(19) United States
(12) Patent Application Publication
(10) Pub. No.: US 2023/0285596 A1
(43) Pub. Date: Sep. 14, 2023

(54) COMPOSITIONS AND METHODS FOR THE TREATMENT OF NIEMANN-PICK TYPE C1 DISEASE

(71) Applicant: Voyager Therapeutics, Inc, Cambridge, MA (US)

(72) Inventors: Heather Yonutas, Cambridge, MA (US); Jeffrey Brown, Medway, MA (US); Jinzhao Hou, Lexington, MA (US); Yanqun Shu, Winchester, MA (US); Elisabeth Knoll, Cambridge, MA (US); Priyantha Herath, Cambridge, MA (US); Brett Hoffman, Cambridge, MA (US)

(21) Appl. No.: 18/018,089

(22) PCT Filed: Jul. 26, 2021
(86) PCT No.: PCT/US2021/043217

§ 371 Date: Jan. 26, 2023

Related U.S. Application Data
(60) Provisional application No. 63/057,258, filed on Jul. 27, 2020.

(51) Int. Cl. A61K 48/00; C07K 14/705; A61K 45/06; A61P 3/06; C12N 15/86

(52) U.S. Cl. CPC A61K 48/0058; C07K 14/705; A61K 48/0041; A61K 45/06; A61P 3/06; C12N 15/86; C12N 2750/14143

(57) ABSTRACT

The disclosure provides compositions and methods for altering, e.g., enhancing, the expression of NPC1 and/or NPC2 proteins, whether in vitro and/or in vivo. Such compositions include delivery of an adeno-associated viral (AAV) particle. The compositions and methods of the present disclosure are useful in the treatment of subjects diagnosed with, or suspected of having NPC1 disease or related condition resulting from a deficiency in the quantity and/or function of NPC1 and/or NPC2 proteins or associated with decreased expression or protein levels of NPC1 and/or NPC2 proteins.

### RELATED APPLICATIONS

[0001] This application claims priority to U.S. provisional application No. 63/057,258, filed on Jul. 27, 2020. The entire contents of the foregoing application are hereby incorporated herein by reference.

### REFERENCE TO THE SEQUENCE LISTING

[0002] The present application is being filed along with a Sequence Listing in electronic format. The Sequence Listing file, entitled 135333-00220_SL, was created on Jul. 23, 2021, and is 6,807,032 bytes in size. The information in electronic format of the Sequence Listing is incorporated herein by reference in its entirety.

### FIELD OF THE DISCLOSURE

[0003] Described herein are compositions and methods relating to polynucleotides, e.g. polynucleotides encoding NPC proteins for use in the treatment of NPC1 and related disorders. In some embodiments, compositions may be delivered in an adeno-associated viral (AAV) vector. In other embodiments, compositions described herein, may be used to treat a subject in need thereof, such as a human subject diagnosed with NPC1 or other condition resulting from a deficiency in the quantity and/or function of NPC1 protein and/or NPC2 protein, or as a research tool in the study of diseases or conditions in cells or animal models of such disease or condition.

### BACKGROUND

[0004] Niemann-Pick Disease describes a class of lysosomal storage diseases (Types A, B, C1, and C2) wherein cellular cholesterol and lipid metabolism and/or storage is impaired, leading to progressive decline in nervous and peripheral tissue function. Niemann-Pick Disease Type C1 (NPC1 or NPC-1) is a rare, fatal neurovisceral disease with a US prevalence estimated at 1 in about 150,000 individuals, with an estimated 500 cases in the US. NPC1 affects neonatal, adolescent, and adult patients with neurological and visceral symptoms, including progressive loss of early motor skills, sudden loss of muscle tone, learning problems, seizure, slurred speech, vertical eye movement difficulties, feeding and swallowing difficulties, hypersensitivity to touch, abdominal enlargement, enlarged spleen or liver, jaundice, unusual shortness of breath, and repeated lung infections. Typically, NPC1 onset presents in school-aged children. NPC1 is currently fatal in all cases, with patients having infant onset dying before age 10 and patients with childhood onset dying before age 20. Adult-onset patients die before 40 years of age. Cause of death in NPC1 patients is often inhalation pneumonia.

[0005] NPC1 is caused by autosomal recessive loss of function mutations in one of two proteins: NPC1 (NPC intracellular cholesterol transporter 1, Ensemble gene ID: ENSG00000141458) and NPC2 (ENSG00000119655), a binding partner of NPC1. Over 300 distinct mutations have been identified in NPC1 patients; though approximately 95% of NPC1 patients have mutations in the NPC1 gene. Disease mutations have been identified in nearly all NPC1 protein domains; however, mutations within the sterol-sensing domain and the cysteine-rich loop domain appear to be most pathogenic (Millat, G., et al. Am. J. Hum. Genetics 69.5 (2001): 1013-1021; Pacheco, C. D., and Lieberman, A. P. Exp. Rev. Mol. Med. 10 (2008); the disclosures of each of which are incorporated herein by reference in their entireties). The disease presents with a high degree of heterogeneity among patients.

[0006] NPC1 protein is an integral transmembrane protein localized predominantly in late-endosomes and lysosomes. It is required for transport of LDL-derived cholesterol. In the presence of functional NPC1 protein, LDLs are taken up by cells and delivered to lysosomes where their cholesterol esters are cleaved. Free cholesterol is then exported from lysosomes for cellular needs and storage. Defective NPC1 protein leads cell autonomously to intracellular cholesterol accumulation. Thus, NPC1 is characterized as a lysosomal storage disorder since patients are not able to properly metabolize cholesterol and other lipids, leading to their intracellular accumulation. Indeed, vacuolar accumulation of cholesterol in the perinuclear region of patient cells is thought to underly eventual atrophy in frontal lobes, cerebellum, and brainstem as well as hepatomegaly and splenomegaly, all typical of NPC1 disease progression.

[0007] Treatments for NPC1 include miglustat and 2-hydroxypropyl-β-cyclodextrin. Miglustat, a glucosylceramide synthase inhibitor, is currently approved for treatment of NPC1 only in the European Union. 2-hydroxypropyl-β-cyclodextrin, a cyclic oligosaccharide that binds and enhances the water solubility of cholesterol, is also useful in treating NPC1. 2-hydroxypropyl-β-cyclodextrin is known to cross the blood-brain barrier (BBB). Both compounds require biweekly intrathecal (IT) injection, and both can effectively delay the onset of neurological signs, ameliorate cerebellar and liver dysfunction, and prolong lifespan in animal models of NPC disease. However, adverse side effects can be severe, and include osmotic diarrhea, outer hair cell death and hearing loss.

[0008] Consequently, there remains a medical-need to develop pharmaceutical compositions and methods for the treatment of NPC1 and related disorders and to ameliorate deficiencies of NPC1 and/or NPC2 protein(s) in patients afflicted with NPC-related disorders.

### SUMMARY

[0009] The present disclosure addresses the need for providing AAV-based compositions and methods for treating NPC1 deficiency in patients. Disclosed herein are compositions and methods directed to AAV-based gene delivery of NPC1 and/or NPC2 to ameliorate loss-of-function of these genes and to improve intracellular lipid trafficking. The compositions and methods are useful to improve cholesterol and lipid metabolism, and to slow, halt, or reverse NPC1 and related disease progression in afflicted patients.

[0010] Accordingly, in one aspect, the present disclosure provides an isolated, e.g., recombinant, vial genome comprising a promoter operably linked to a nucleic acid comprising a transgene encoding an NPC1 protein, wherein the NPC1 protein is encoded by a nucleotide sequence, e.g., a codon optimized nucleotide sequence, comprising a nucleotide sequence with at least 85% (e.g., at least about 90, 92, 95, 96, 97, 98, or 99%) sequence identity to the nucleotide sequence of SEQ ID NO: 1750 or 1749.

[0011] In another aspect, the present disclosure provides an isolated, e.g., recombinant, vial genome comprising a promoter operably linked to a nucleic acid comprising a transgene encoding an NPC1 protein, wherein the promoter comprises an EF-1a promoter variant, e.g., a truncated EF-1a promoter, which comprises a nucleotide sequence that is less than the full length of the nucleotide sequence of a wild-type (WT) EF-1a promoter comprising SEQ ID NO: 1781 (e.g., at least 10, 20, 25, 30, 50, 100, 150, 200, 250, 300, 350, 400, 450, 500, 550, 600, 650, 700, 750, 800, 850, 900, or 950 nucleotides less), optionally provided that the EF-1a promoter variant does not comprise the nucleotides “GC” at positions 235-236, numbered according to SEQ ID NO: 1781.

[0012] In yet another aspect, the present disclosure provides an isolated, e.g., recombinant, vial genome comprising a promoter operably linked to a nucleic acid comprising a transgene encoding an NPC1 protein, wherein the promoter comprises an EF-1a promoter variant comprising [A]-[B]-[C]-[D]-[E], wherein: (i) [A] comprises SEQ ID NO: 1792, 1793, or 1794, or a sequence having at least sequence comprising at least one, two, or three but no more than four modifications, e.g., substitutions (e.g., conservative substitutions), relative to the nucleotide sequence of SEQ ID NO: 1792, 1793, or 1794; or [A] is absent; (ii) [B] comprises the nucleotide sequence of SEQ ID NO: 1795, or a sequence having at least sequence comprising at least one or two, but no more than 3 modifications, e.g., substitutions (e.g., conservative substitutions), relative to the nucleotide sequence of SEQ ID NO: 1795 or [B] is absent; (iii) [C] comprises the nucleotides GT, the nucleotide sequence of SEQ ID NO: 1797, or a nucleotide sequence comprising at least one, two, or three but no more than four modifications, e.g., substitutions (e.g., conservative substitutions), relative to the nucleotide sequence of SEQ ID NO: 1797, or [C] is absent; (iv) [D] comprises the nucleotide sequence of SEQ ID NO: 1822, or a nucleotide sequence having at least 90% (e.g., 92, 95, 96, 97, 98, or 99%) sequence identity thereto, provided that [D] does not comprise the nucleotides “GC” at positions 235-236, numbered according to SEQ ID NO: 1781; and (v) [E] comprises the nucleotide sequence of SEQ ID NO: 1798, or a sequence having at least sequence comprising at least one or two, but no more than 3 modifications, e.g., substitutions (e.g., conservative substitutions), relative to the nucleotide sequence of SEQ ID NO: 1798 or [E] is absent.

[0013] In some embodiments, the viral genome comprises an internal terminal repeat (ITR) sequence (e.g., an ITR region described herein), an enhancer (e.g., an enhancer described herein), an intron region (e.g., an intron region described herein), a Kozak sequence (e.g., a Kozak sequence described herein), an exon region (e.g., an exon region described herein), and/or a poly A signal region (e.g., a poly A signal sequence described herein). In some embodiments, the viral genome comprises the nucleotide sequence of any one of SEQ ID NOs: 1799-1802, or a nucleotide sequence at least 95% identical thereto.

[0014] In yet another aspect, the present disclosure provides an isolated, e.g., recombinant, AAV particle comprising a capsid protein and a viral genome comprising a promoter (e.g., a promoter described herein) operably linked transgene encoding an NPC1 protein described herein. In some embodiments, the capsid protein comprises an AAV capsid protein, e.g., a wild-type AAV capsid protein or a functional variant thereof. In some embodiments, the capsid protein comprises, or is chosen from, an AAV9 capsid protein (e.g., a wild-type AAV9 capsid protein), or a functional variant thereof.

[0015] In yet another aspect, the present disclosure provides a method of making a viral genome described herein The method comprising providing a nucleic acid encoding a viral genome described herein and a backbone region suitable for replication of the viral genome in a cell, e.g., a bacterial cell (e.g., wherein the backbone region comprises one or both of a bacterial origin of replication and a selectable marker), and excising the viral from the backbone region, e.g., by cleaving the nucleic acid molecule at upstream and downstream of the viral genome.

[0016] In yet another aspect, the present disclosure provides a method of making an isolated, e.g., recombinant AAV particle. The method comprising providing a host cell comprising a viral genome described herein and incubating the host cell under conditions suitable to enclose the viral genome in the AAV particle, e.g., an AAV9 capsid protein, thereby making the isolated AAV particle.

[0017] In yet another aspect, the present disclosure provides method of delivering an exogenous NPC1 protein, to a subject. The method comprising administering an effective amount of an AAV particle or a plurality of AAV particles, described herein, said AAV particle comprising a viral genome described herein.

[0018] In yet another aspect, the present disclosure provides a method of treating a subject having or being diagnosed as having a neurological disorder and/or a disease associated with NPC1 expression. The method comprising administering to the subject an effective amount of an AAV particle or a plurality of AAV particles, described herein, comprising a viral genome described herein. In some embodiments, the disease associated with NPC1 expression comprises a lysosomal storage disease or Niemann-Pick disease, type C1.

[0019] In some aspects, the present disclosure provides adeno-associated viral (AAV) vector genomes comprising: a 5′ inverted terminal repeat (ITR), a promoter, a payload region, and a 3′ ITR; wherein the payload region encodes an NPC protein.

[0020] The AAV vector genomes can have a nucleotide sequence encoding an amino acid sequence of the NPC protein having at least 80%, at least 85%, at least 90%, at least 95%, or at least 99% sequence identity to an NPC protein as provided in Table 2.

[0021] The AAV vector can have a nucleotide sequence encoding an NPC protein having an amino acid sequence of an NPC protein as provided in Table 2.

[0022] The AAV vector genomes can have an NPC protein-encoding nucleic acid sequence having at least 80%, at least 85%, at least 90%, at least 95%, or at least 99% sequence identity to a nucleic acid sequence as provided in Table 2, or a fragment thereof.

[0023] The AAV vector genomes can have a nucleic acid sequence encoding the NPC protein which comprises SEQ ID NO: 1724 or a fragment thereof.

[0024] The AAV vector genomes can encode a cynomolgus (Macaca fascicularis) NPC protein, a rhesus macaque (Macaca mulatta) NPC protein, or an at least partially humanized NPC protein.

[0025] The AAV vector genomes can have a 5′ ITR that is an AAV2 ITR.

[0026] The AAV vector genomes can have a 5′ ITR that is 130 nucleotides in length.

[0027] The AAV vector genomes can have a 3′ ITR that is an AAV2 ITR.

[0028] The AAV vector genomes can have a 3′ ITR that is 130 nucleotides in length.

[0029] The AAV vector genomes can comprise one or more of (e.g., all of) the following components: a promoter region, a Kozak region, an NPC protein region, or a polyadenylation (polyA) region.

[0030] The AAV vector genomes can comprise an ITR to ITR sequence of SEQ ID NO: 1752, SEQ ID NO: 1753, SEQ ID NO: 1754, SEQ ID NO: 1755, or SEQ ID NO: 1756, SEQ ID NO: 1757, SEQ ID NO: 1758, or SEQ ID NO: 1759.

[0031] In some aspects, the disclosure provides AAV particles comprising the AAV vector genomes described herein and a capsid.

[0032] The AAV particles can have a capsid comprising an amino acid sequence which comprises or which is encoded by a sequence selected from SEQ ID NOs: 1-1261.

[0033] Also provided are pharmaceutical compositions comprising the AAV particles described.

[0034] In some aspects, the disclosure provides methods of treating a lysosomal storage disorder, said method comprising administering to a subject the pharmaceutical compositions described.

[0035] The lysosomal storage disorder can be NPC1 disease or related disorder.

[0036] The lysosomal storage disorder can be a disorder associated with decreased NPC (i.e., NPC1 or NPC2) protein levels.

[0037] Administration of the pharmaceutical compositions described can result in a 0.5×-3.0× increase in NPC protein expression in a target cell of the subject, as compared to NPC protein expression in an equivalent target cell in a subject without a disorder associated with decreased NPC protein levels.

[0038] The methods described can further comprise administering miglustat to the subject.

[0039] Those skilled in the art will recognize or be able to ascertain using no more than routine experimentation, many equivalents to the specific embodiments of the invention described herein. Such equivalents are intended to be encompassed by the following enumerated embodiments.

### Enumerated Embodiments

[0040] 1. An isolated, e.g., recombinant, nucleic acid comprising a transgene encoding an NPC1 protein, wherein the nucleotide sequence encoding the NPC1 protein (e.g., a codon optimized nucleotide sequence) comprises a nucleotide sequence with at least 85% (e.g., at least about 90, 92, 95, 96, 97, 98, or 99%) sequence identity to the nucleotide sequence of SEQ ID NO: 1750 or 1749.
[0041] 2. An isolated, e.g., recombinant, vial genome comprising a promoter operably linked to a nucleic acid comprising a transgene encoding an NPC1 protein, wherein the nucleotide sequence encoding the NPC1 protein (e.g., a codon optimized nucleotide sequence) comprises a nucleotide sequence with at least 85% (e.g., at least about 90, 92, 95, 96, 97, 98, or 99%) sequence identity to the nucleotide sequence of SEQ ID NO: 1750 or 1749.
[0042] 3. An isolated, e.g., recombinant, vial genome comprising a promoter operably linked to a nucleic acid comprising a transgene encoding an NPC1 protein, wherein the promoter comprises:
   [0043] (a) an EF-1a promoter variant, e.g., a truncated EF-1a promoter, which comprises a nucleotide sequence that is less than the full length of the nucleotide sequence of a wild-type (WT) EF-1a promoter comprising SEQ ID NO: 1781 (e.g., at least 10, 20, 25, 30, 50, 100, 150, 200, 250, 300, 350, 400, 450, 500, 550, 600, 650, 700, 750, 800, 850, 900, or 950 nucleotides less), optionally provided that the EF-1a promoter variant does not comprise the nucleotides “GC” at positions 235-236, numbered according to SEQ ID NO: 1781; or
   [0044] (b) an EF-1a promoter variant comprising [A]-[B]-[C]-[D]-[E], wherein:
      [0045] (i) [A] comprises SEQ ID NO: 1792, 1793, or 1794, or a sequence having at least sequence comprising at least one, two, or three but no more than four modifications, e.g., substitutions (e.g., conservative substitutions), relative to the nucleotide sequence of SEQ ID NO: 1792, 1793, or 1794; or [A] is absent;
      [0046] (ii) [B] comprises the nucleotide sequence of SEQ ID NO: 1795, or a sequence having at least sequence comprising at least one or two, but no more than 3 modifications, e.g., substitutions (e.g., conservative substitutions), relative to the nucleotide sequence of SEQ ID NO: 1795 or [B] is absent;
      [0047] (iii) [C] comprises the nucleotides GT, the nucleotide sequence of SEQ ID NO: 1797, or a nucleotide sequence comprising at least one, two, or three but no more than four modifications, e.g., substitutions (e.g., conservative substitutions), relative to the nucleotide sequence of SEQ ID NO: 1797, or [C] is absent;
      [0048] (iv) [D] comprises the nucleotide sequence of SEQ ID NO: 1822, or a nucleotide sequence having at least 90% (e.g., 92, 95, 96, 97, 98, or 99%) sequence identity thereto, provided that [D] does not comprise the nucleotides “GC” at positions 235-236, numbered according to SEQ ID NO: 1781; and
      [0049] (v) [E] comprises the nucleotide sequence of SEQ ID NO: 1798, or a sequence having at least sequence comprising at least one or two, but no more than 3 modifications, e.g., substitutions (e.g., conservative substitutions), relative to the nucleotide sequence of SEQ ID NO: 1798 or [E] is absent.
[0050] 4. The isolated nucleic acid of embodiment 1 or the viral genome of embodiment 2 or 3, wherein the nucleotide sequence encoding the NPC1 protein comprises a nucleotide sequence with at least 85% (e.g., at least about 90, 92, 95, 96, 97, 98, or 99%) sequence identity to the nucleotide sequence of SEQ ID NO: 1750 or 1749.
[0051] 5. The isolated nucleic acid of embodiment 1 or the viral genome any one of embodiments 2-4, wherein the nucleotide sequence encoding the NPC1 protein comprises a nucleotide sequence with at least 95% sequence identity to the nucleotide sequence of SEQ ID NO: 1750 or 1749.
[0052] 6. The isolated nucleic acid of embodiment 1 or the viral genome of any one of embodiments 2-5, wherein the nucleotide sequence encoding the NPC1 protein comprises the nucleotide sequence of SEQ ID NO: 1750.
[0053] 7. The isolated nucleic acid of embodiment 1 or the viral genome of any one of embodiments 2-5, wherein the nucleotide sequence encoding the NPC1 protein comprises the nucleotide sequence of SEQ ID NO: 1749.
[0054] 8. The viral genome of embodiment 3, wherein the nucleotide sequence encoding the NPC1 protein comprises the nucleotide sequence of SEQ ID NO: 1747, or a nucleotide sequence at least 85% (e.g., at least about 90, 92, 95, 96, 97, 98, or 99%) sequence identity thereto.
[0055] 9. The isolated nucleic acid of embodiment 1 or the viral genome of any one of embodiments 2-7, wherein the nucleotide sequence encoding the NPC1 protein sequence is codon optimized.
[0056] 10. The isolated nucleic acid of embodiment 1 or the viral genome of any one of embodiments 2-9, wherein the encoded NPC1 protein comprises the amino acid sequence of SEQ ID NO: 1748, or an amino acid sequence at least 95% identical thereto.
[0057] 11. The isolated nucleic acid of embodiment 1 or the viral genome of any one of embodiments 2-7 or 9, wherein the encoded NPC1 protein comprises an amino acid sequence encoded by the nucleotide sequence of SEQ ID NO: 1749 or 1750, or a nucleotide sequence at least 85% (e.g., at least about 90, 92, 95, 96, 97, 98, or 99%) identical thereto.
[0058] 12. The viral genome of any one of embodiments 2-11, wherein the promoter comprises an EF-1a promoter variant, e.g., a truncated EF-1a promoter, which comprises a nucleotide sequence that is less than the full length of a wild-type (WT) EF-1a promoter comprising SEQ ID NO: 1781 (e.g., at least 10, 20, 25, 30, 50, 100, 150, 200, 250, 300, 350, 400, 450, 500, 550, 600, 650, 700, 750, 800, 850, 900, or 950 nucleotides less), optionally provided that the EF-1a promoter variant does not comprise the nucleotides “GC” at positions 235-236, numbered according to SEQ ID NO: 1781.
[0059] 13. The viral genome of any one of embodiments 3-11, wherein the EF-1a promoter variant comprises a nucleotide sequence that comprises at least 10, 20, 25, 30, 50, 100, 150, 200, 250, 300, 350, 400, 450, 500, 550, 600, 650, 700, 750, 800, 850, 900, or 950 nucleotides less than the full length of a wild-type (WT) EF-1a promoter comprising SEQ ID NO: 1781.
[0060] 14. The viral genome of any one of embodiments 3-13, wherein the EF-1a promoter variant comprises an intron, e.g., an intron comprising the nucleotide sequence of positions 237-1,184 of SEQ ID NO: 1781.
[0061] 15. The viral genome of any one of embodiments 3-14, wherein the EF-1a promoter variant comprises a portion of an intron, wherein the portion comprises no more than 5-50 nucleotides, e.g., 5-40 nucleotides, 5-30 nucleotides, 5-20 nucleotides, 5-10 nucleotides, 10-50 nucleotides, 10-40 nucleotides, 10-30 nucleotides, 10-20 nucleotides, 20-50 nucleotides, 20-40 nucleotides, 20-30 nucleotides, 30-50 nucleotides, 30-40 nucleotides, 40-50 nucleotides, 5 nucleotides, 10 nucleotides, 15 nucleotides, 20 nucleotides, 25 nucleotides, 30 nucleotides, 40 nucleotides, or 50 nucleotides of the intron e.g., an intron comprising the nucleotide sequence of positions 237-1,184 of SEQ ID NO: 1781.
[0062] 16. The viral genome of any one of embodiments 3-15, wherein the EF-1a promoter variant comprises a portion of an intron, wherein the portion comprises the nucleotide sequence of SEQ ID NO: 1798.
[0063] 17. The viral genome of any one of embodiments 3-13, wherein the EF-1a promoter variant does not comprises an intron, e.g., does not comprise the nucleotide sequence of positions 237-1,184 of SEQ ID NO: 1781.
[0064] 18. The viral genome of any one of embodiments 2-16, wherein the EF-1a promoter variant comprises nucleotides 1-241 of SEQ ID NO: 1781.
[0065] 19. The viral genome of any one of embodiments 2-16, wherein the EF-1a promoter variant comprises nucleotides 1-236 of SEQ ID NO: 1781.
[0066] 20. The viral genome of any one of embodiments 2-16, wherein the EF-1a promoter variant comprises nucleotides 7-236 of SEQ ID NO: 1781.
[0067] 21. The viral genome of any one of embodiments 2-16 or 20, wherein the EF-1a promoter variant comprises nucleotides 7-241 of SEQ ID NO: 1781.
[0068] 22. The viral genome of any one of embodiments 2-16, wherein the EF-1a promoter variant comprises nucleotides 13-236 or 13-241 of SEQ ID NO: 1781.
[0069] 23. The viral genome of any one of embodiments 2-16, wherein the EF-1a promoter variant comprises nucleotides 15-236 or 15-241 of SEQ ID NO: 1781.
[0070] 24. The viral genome of any one of embodiments 2-23, wherein the EF-1a promoter variant further comprises the nucleotide sequence of SEQ ID NO: 1792, 1793, or 1794, or a sequence having at least one, two, or three but no more than four modifications, e.g., substitutions (e.g., conservative substitutions), relative to the nucleotide sequence of SEQ ID NO: 1792, 1793, or 1794.
[0071] 25. The viral genome of any one of embodiments 2-24, wherein the EF-1a promoter variant comprises from 5′ to 3′:
   [0072] (i) the nucleotide sequence of SEQ ID NO: 1792, or a sequence having at least one or two modifications, e.g., substitutions (e.g., conservative substitutions), relative to the nucleotide sequence of SEQ ID NO: 1792; and
   [0073] (ii) nucleotides 1-236 of SEQ ID NO: 1781.
[0074] 26. The viral genome of any one of embodiments 2-24, wherein the EF-1a promoter variant comprises from 5′ to 3′:
   [0075] (i) the nucleotide sequence of SEQ ID NO: 1793, or a sequence having at least one, two, or three but no more than four modifications, e.g., substitutions (e.g., conservative substitutions), relative to the nucleotide sequence of SEQ ID NO: 1793; and
   [0076] (ii) nucleotides 1-236 of SEQ ID NO: 1781.
[0077] 27. The viral genome of any one of embodiments 2-24, wherein the EF-1a promoter variant comprises from 5′ to 3′:
   [0078] (i) the nucleotide sequence of SEQ ID NO: 1794, or a sequence having at least one, two, or three but no more than four modifications, e.g., substitutions (e.g., conservative substitutions), relative to the nucleotide sequence of SEQ ID NO: 1794; and
   [0079] (ii) nucleotides 1-236 of SEQ ID NO: 1781.
[0080] 28. The viral genome of any one of embodiments 3-24, wherein the EF-1a promoter variant comprises the nucleotide sequence of SEQ ID NO: 1785, 1787, 1789, or 1791.
[0081] 29. The viral genome of any one of embodiments 2-11, wherein the promoter comprises an EF-1a promoter variant comprising [A]-[B]-[C]-[D]-[E], wherein:
   [0082] (i) [A] comprises SEQ ID NO: 1792, 1793, or 1794, or a sequence having at least sequence comprising at least one, two, or three but no more than four modifications, e.g., substitutions (e.g., conservative substitutions), relative to the nucleotide sequence of SEQ ID NO: 1792, 1793, or 1794; or [A] is absent;
   [0083] (ii) [B] comprises the nucleotide sequence of SEQ ID NO: 1795, or a sequence having at least sequence comprising at least one or two, but no more than 3 modifications, e.g., substitutions (e.g., conservative substitutions), relative to the nucleotide sequence of SEQ ID NO: 1795 or [B] is absent;
   [0084] (iii) [C] comprises the nucleotides GT, the nucleotide sequence of SEQ ID NO: 1797, or a nucleotide sequence comprising at least one, two, or three but no more than four modifications, e.g., substitutions (e.g., conservative substitutions), relative to the nucleotide sequence of SEQ ID NO: 1797, or [C] is absent;
   [0085] (iv) [D] comprises the nucleotide sequence of SEQ ID NO: 1822, or a nucleotide sequence having at least 90% (e.g., 92, 95, 96, 97, 98, or 99%) sequence identity thereto, provided that [D] does not comprise the nucleotides “GC” at positions 235-236, numbered according to SEQ ID NO: 1781; and
   [0086] (v) [E] comprises the nucleotide sequence of SEQ ID NO: 1798, or a sequence having at least sequence comprising at least one or two, but no more than 3 modifications, e.g., substitutions (e.g., conservative substitutions), relative to the nucleotide sequence of SEQ ID NO: 1798 or [E] is absent.
[0087] 30. The viral genome of any one of embodiments 3-11 or 29, wherein [A] comprises SEQ ID NO: 1792, 1793, or 1794, or a sequence having at least sequence comprising at least one, two, or three but no more than four modifications, e.g., substitutions (e.g., conservative substitutions), relative to the nucleotide sequence of SEQ ID NO: 1792, 1793, or 1794.
[0088] 31. The viral genome of any one of embodiments 3-11 or 29-30, wherein [B] comprises the nucleotide sequence of SEQ ID NO: 1795, or a sequence having at least sequence comprising at least one or two, but no more than 3 modifications, e.g., substitutions (e.g., conservative substitutions), relative to the nucleotide sequence of SEQ ID NO: 1795.
[0089] 32. The viral genome of any one of embodiments 3-11 or 29-31, wherein [C] comprises the nucleotides GT, the nucleotide sequence of SEQ ID NO: 1797, or a nucleotide sequence comprising at least one, two, or three but no more than four modifications, e.g., substitutions (e.g., conservative substitutions), relative to the nucleotide sequence of SEQ ID NO: 1797.
[0090] 33. The viral genome of any one of embodiments 3-11 or 29-32, wherein [D] comprises the nucleotide sequence of SEQ ID NO: 1822, or a nucleotide sequence having at least 90% (e.g., 92, 95, 96, 97, 98, or 99%) sequence identity thereto, provided that [D] does not comprise the nucleotides “GC” at positions 235-236, numbered according to SEQ ID NO: 1781.
[0091] 34. The viral genome of any one of embodiments 3-11 or 29-33, wherein [E] comprises the nucleotide sequence of SEQ ID NO: 1798, or a sequence having at least sequence comprising at least one or two, but no more than 3 modifications, e.g., substitutions (e.g., conservative substitutions), relative to the nucleotide sequence of SEQ ID NO: 1798.
[0092] 35. The viral genome of any one of embodiments 3-11 or 29-34, wherein:
   [0093] (i) [A] is absent;
   [0094] (ii) [B] comprises the nucleotide sequence of SEQ ID NO: 1795, or a sequence having at least sequence comprising at least one or two, but no more than 3 modifications, e.g., substitutions (e.g., conservative substitutions), relative to the nucleotide sequence of SEQ ID NO: 1795 or [B] is absent;
   [0095] (iii) [C] comprises the nucleotides GT, the nucleotide sequence of SEQ ID NO: 1797, or a nucleotide sequence comprising at least one, two, or three but no more than four modifications, e.g., substitutions (e.g., conservative substitutions), relative to the nucleotide sequence of SEQ ID NO: 1797, or [C] is absent;
   [0096] (iv) [D] comprises the nucleotide sequence of SEQ ID NO: 1822, or a nucleotide sequence having at least 90% (e.g., 92, 95, 96, 97, 98, or 99%) sequence identity thereto, provided that [D] does not comprise the nucleotides “GC” at positions 235-236, numbered according to SEQ ID NO: 1781; and
   [0097] (v) [E] is absent.
[0098] 36. The viral genome of any one of embodiments 3-11 or 29-34, wherein:
   [0099] (i) [A] comprises SEQ ID NO: 1792, or a sequence having at least sequence comprising at least one or two modifications, e.g., substitutions (e.g., conservative substitutions), relative to the nucleotide sequence of SEQ ID NO: 1792;
   [0100] (ii) [B] comprises the nucleotide sequence of SEQ ID NO: 1795, or a sequence having at least sequence comprising at least one or two, but no more than 3 modifications, e.g., substitutions (e.g., conservative substitutions), relative to the nucleotide sequence of SEQ ID NO: 1795 or [B] is absent;
   [0101] (iii) [C] comprises the nucleotides GT, the nucleotide sequence of SEQ ID NO: 1797, or a nucleotide sequence comprising at least one, two, or three but no more than four modifications, e.g., substitutions (e.g., conservative substitutions), relative to the nucleotide sequence of SEQ ID NO: 1797, or [C] is absent;
   [0102] (iv) [D] comprises the nucleotide sequence of SEQ ID NO: 1822, or a nucleotide sequence having at least 90% (e.g., 92, 95, 96, 97, 98, or 99%) sequence identity thereto, provided that [D] does not comprise the nucleotides “GC” at positions 235-236, numbered according to SEQ ID NO: 1781; and
   [0103] (v) [E] is absent.
[0104] 37. The viral genome of any one of embodiments 3-11 or 29-34, wherein:
   [0105] (i) [A] comprises SEQ ID NO: 1793, or a sequence having at least sequence comprising at least one, two, or three but no more than four modifications, e.g., substitutions (e.g., conservative substitutions), relative to the nucleotide sequence of SEQ ID NO: 1793;
   [0106] (ii) [B] comprises the nucleotide sequence of SEQ ID NO: 1795, or a sequence having at least sequence comprising at least one or two, but no more than 3 modifications, e.g., substitutions (e.g., conservative substitutions), relative to the nucleotide sequence of SEQ ID NO: 1795 or [B] is absent;
   [0107] (iii) [C] comprises the nucleotides GT, the nucleotide sequence of SEQ ID NO: 1797, or a nucleotide sequence comprising at least one, two, or three but no more than four modifications, e.g., substitutions (e.g., conservative substitutions), relative to the nucleotide sequence of SEQ ID NO: 1797, or [C] is absent;
   [0108] (iv) [D] comprises the nucleotide sequence of SEQ ID NO: 1822, or a nucleotide sequence having at least 90% (e.g., 92, 95, 96, 97, 98, or 99%) sequence identity thereto, provided that [D] does not comprise the nucleotides “GC” at positions 235-236, numbered according to SEQ ID NO: 1781; and
   [0109] (v) [E] is absent.
[0110] 38. The viral genome of any one of embodiments 3-11 or 29-34, wherein:
   [0111] (i) [A] comprises SEQ ID NO: 1794, or a sequence having at least sequence comprising at least one, two, or three but no more than four modifications, e.g., substitutions (e.g., conservative substitutions), relative to the nucleotide sequence of SEQ ID NO: 1794;
   [0112] (ii) [B] comprises the nucleotide sequence of SEQ ID NO: 1795, or a sequence having at least sequence comprising at least one or two, but no more than 3 modifications, e.g., substitutions (e.g., conservative substitutions), relative to the nucleotide sequence of SEQ ID NO: 1795 or [B] is absent;
   [0113] (iii) [C] comprises the nucleotides GT, the nucleotide sequence of SEQ ID NO: 1797, or a nucleotide sequence comprising at least one, two, or three but no more than four modifications, e.g., substitutions (e.g., conservative substitutions), relative to the nucleotide sequence of SEQ ID NO: 1797, or [C] is absent;
   [0114] (iv) [D] comprises the nucleotide sequence of SEQ ID NO: 1822, or a nucleotide sequence having at least 90% (e.g., 92, 95, 96, 97, 98, or 99%) sequence identity thereto, provided that [D] does not comprise the nucleotides “GC” at positions 235-236, numbered according to SEQ ID NO: 1781; and
   [0115] (v) [E] is absent.
[0116] 39. The viral genome of any one of embodiments 3-11 or 29-34, wherein the EF-1a promoter variant comprises the nucleotide sequence of SEQ ID NO: 1785, 1787, 1789, or 1791, or a nucleotide sequence having at least 95% sequence identity thereto, provided that the EF-1a promoter variant does not comprise the nucleotides “GC” at positions 235-236, numbered according to SEQ ID NO: 1781.
[0117] 40. The viral genome of embodiment 2, wherein the promoter comprises ubiquitous promoter or a tissue specific promoter.
[0118] 41. The viral genome of embodiment 2 or 40, wherein the promoter comprises an EF-1a promoter, a chicken β-actin (CBA) promoter and/or its derivative CAG, a CMV immediate-early enhancer and/or promoter, a β glucuronidase (GUSB) promoter, a ubiquitin C (UBC) promoter, a neuron-specific enolase (NSE), a platelet-derived growth factor (PDGF) promoter, a platelet-derived growth factor B-chain (PDGF-β) promoter, an intercellular adhesion molecule 2 (ICAM-2) promoter, a synapsin (Syn) promoter, a methyl-CpG binding protein 2 (MeCP2) promoter, a Ca2+/calmodulin-dependent protein kinase II (CaMKII) promoter, a metabotropic glutamate receptor 2 (mGluR2) promoter, a neurofilament light (NFL) or heavy (NFH) promoter, a β-globin minigene nβ2 promoter, a preproenkephalin (PPE) promoter, an enkephalin (Enk) and excitatory amino acid transporter 2 (EAAT2), a glial fibrillary acidic protein (GFAP) promoter, a myelin basic protein (MBP) promoter, a cardiovascular promoter (e.g., αMHC, cTnT, and CMV-MLC2k), a liver promoter (e.g., hAAT, TBG), a skeletal muscle promoter (e.g., desmin, MCK, C512) or a fragment, e.g., a truncation, or a functional variant thereof.
[0119] 42. The viral genome of any one of embodiments 2 or 40-41, wherein the promoter comprises:
   [0120] (i) a CMV promoter; or
   [0121] (ii) a CMVie enhancer and a CMV promoter, optionally wherein the CMVie enhancer comprises the nucleotide sequence of SEQ ID NO: 1743, or a nucleotide sequence at least 95% identical thereto, and the CMV promoter comprises the nucleotide sequence of SEQ ID NO: 1736, or a nucleotide sequence at least 95% identical thereto.
[0122] 43. The viral genome of any one of embodiments 2 or 40-42, wherein the promoter comprises the nucleotide sequence of SEQ ID NO: 1736 or 1739-1741, or a nucleotide sequence at least 95% identical thereto.
[0123] 44. The viral genome of any one of embodiments 2 or 40-43, wherein the promoter comprises the nucleotide sequence of SEQ ID NO: 1736 or a nucleotide sequence at least 95% identical thereto.
[0124] 45. The viral genome of embodiment 41 or 42, wherein the CMVie enhancer comprises the nucleotide sequence of SEQ ID NO: 1737, 1742, or 1743, or a nucleotide sequence at least 95% identical thereto.
[0125] 46. The viral genome of any one of embodiments 2 or 40-41, wherein the promoter comprises:
   [0126] (i) a CBA promoter; or
   [0127] (ii) a CMVie enhancer and a CBA promoter, optionally wherein:
      [0128] (a) the CMVie enhancer comprises the nucleotide sequence of SEQ ID NO: 1742, or a nucleotide sequence 95% identical thereto, and the CBA promoter comprises the nucleotide sequence of SEQ ID NO: 1735, or a nucleotide sequence at least 95% identical thereto; or
      [0129] (b) the CMVie enhancer comprises the nucleotide sequence of SEQ ID NO: 1737, or a nucleotide sequence 95% identical thereto, and the CBA promoter comprises the nucleotide sequence of SEQ ID NO: 1735, or a nucleotide sequence at least 95% identical thereto.
[0130] 47. The viral genome of any one of embodiments 2, 40-41, or 46, wherein the promoter comprises the nucleotide sequence of SEQ ID NO: 1735 or 1738, or a nucleotide sequence at least 95% identical thereto.
[0131] 48. The viral genome of any one of embodiments 2 or 40-41, wherein the promoter comprises an EF-1a promoter or an EF-1a promoter variant.
[0132] 49. The promoter of embodiment 48, wherein the EF-1a promoter comprises the nucleotide sequence of SEQ ID NO: 1781, or a nucleotide sequence at least 95% identical thereto.
[0133] 50. The promoter of embodiment 48, wherein the EF-1a promoter variant comprises [A]-[B]-[C]-[D]-[E], wherein:
   [0134] (i) [A] comprises SEQ ID NO: 1792, 1793, or 1794, or a sequence having at least sequence comprising at least one, two, or three but no more than four modifications, e.g., substitutions (e.g., conservative substitutions), relative to the nucleotide sequence of SEQ ID NO: 1792, 1793, or 1794; or [A] is absent;
   [0135] (ii) [B] comprises the nucleotide sequence of SEQ ID NO: 1795, or a sequence having at least sequence comprising at least one or two, but no more than 3 modifications, e.g., substitutions (e.g., conservative substitutions), relative to the nucleotide sequence of SEQ ID NO: 1795 or [B] is absent;
   [0136] (iii) [C] comprises the nucleotides GT, the nucleotide sequence of SEQ ID NO: 1797, or a nucleotide sequence comprising at least one, two, or three but no more than four modifications, e.g., substitutions (e.g., conservative substitutions), relative to the nucleotide sequence of SEQ ID NO: 1797, or [C] is absent;
   [0137] (iv) [D] comprises the nucleotide sequence of SEQ ID NO: 1822 or 1823, or a nucleotide sequence having at least 90% (e.g., 92, 95, 96, 97, 98, or 99%) sequence identity thereto; and
   [0138] (v) [E] comprises the nucleotide sequence of SEQ ID NO: 1798, or a sequence having at least sequence comprising at least one or two, but no more than 3 modifications, e.g., substitutions (e.g., conservative substitutions), relative to the nucleotide sequence of SEQ ID NO: 1798 or [E] is absent.
[0139] 51. The viral genome of embodiment 50, wherein:
   [0140] (i) [A] is absent;
   [0141] (ii) [B] is absent;
   [0142] (iii) [C] is absent;
   [0143] (iv) [D] comprises the nucleotide sequence of SEQ ID NO: 1823, or a nucleotide sequence having at least 90% (e.g., 92, 95, 96, 97, 98, or 99%) sequence identity thereto; and
   [0144] (v) [E] comprises the nucleotide sequence of SEQ ID NO: 1798, or a sequence having at least sequence comprising at least one or two, but no more than 3 modifications, e.g., substitutions (e.g., conservative substitutions), relative to the nucleotide sequence of SEQ ID NO: 1798.
[0145] 52. The viral genome of embodiment 50, wherein:
   [0146] (i) [A] is absent;
   [0147] (ii) [B] is absent;
   [0148] (iii) [C] comprises the nucleotides GT;
   [0149] (iv) [D] comprises the nucleotide sequence of SEQ ID NO: 1823, or a nucleotide sequence having at least 90% (e.g., 92, 95, 96, 97, 98, or 99%) sequence identity thereto; and
   [0150] (v) [E] comprises the nucleotide sequence of SEQ ID NO: 1798, or a sequence having at least sequence comprising at least one or two, but no more than 3 modifications, e.g., substitutions (e.g., conservative substitutions), relative to the nucleotide sequence of SEQ ID NO: 1798.
[0151] 53. The viral genome of embodiment 50, wherein:
   [0152] (i) [A] is absent;
   [0153] (ii) [B] is absent;
   [0154] (iii) [C] comprises the nucleotide sequence of SEQ ID NO: 1797, or a nucleotide sequence comprising at least one, two, or three but no more than four modifications, e.g., substitutions, relative to the nucleotide sequence of SEQ ID NO: 1797;
   [0155] (iv) [D] comprises the nucleotide sequence of SEQ ID NO: 1823, or a nucleotide sequence having at least 90% (e.g., 92, 95, 96, 97, 98, or 99%) sequence identity thereto; and
   [0156] (v) [E] comprises the nucleotide sequence of SEQ ID NO: 1798, or a sequence having at least sequence comprising at least one or two, but no more than 3 modifications, e.g., substitutions (e.g., conservative substitutions), relative to the nucleotide sequence of SEQ ID NO: 1798.
[0157] 54. The viral genome of embodiment 50, wherein:
   [0158] (i) [A] is absent;
   [0159] (ii) [B] comprises the nucleotide sequence of SEQ ID NO: 1795, or a sequence having at least sequence comprising at least one or two, but no more than 3 modifications, e.g., substitutions (e.g., conservative substitutions), relative to the nucleotide sequence of SEQ ID NO: 1795;
   [0160] (iii) [C] comprises the nucleotide sequence of SEQ ID NO: 1797, or a nucleotide sequence comprising at least one, two, or three but no more than four modifications, e.g., substitutions (e.g., conservative substitutions), relative to the nucleotide sequence of SEQ ID NO: 1797;
   [0161] (iv) [D] comprises the nucleotide sequence of SEQ ID NO: 1823, or a nucleotide sequence having at least 90% (e.g., 92, 95, 96, 97, 98, or 99%) sequence identity thereto; and
   [0162] (v) [E] comprises the nucleotide sequence of SEQ ID NO: 1798, or a sequence having at least sequence comprising at least one or two, but no more than 3 modifications, e.g., substitutions (e.g., conservative substitutions), relative to the nucleotide sequence of SEQ ID NO: 1798.
[0163] 55. The viral genome of embodiment 50, wherein:
   [0164] (i) [A] is absent;
   [0165] (ii) [B] comprises the nucleotide sequence of SEQ ID NO: 1795, or a sequence having at least sequence comprising at least one or two, but no more than 3 modifications, e.g., substitutions (e.g., conservative substitutions), relative to the nucleotide sequence of SEQ ID NO: 1795;
   [0166] (iii) [C] comprises the nucleotide sequence of SEQ ID NO: 1797, or a nucleotide sequence comprising at least one, two, or three but no more than four modifications, e.g., substitutions (e.g., conservative substitutions), relative to the nucleotide sequence of SEQ ID NO: 1797, or [C] is absent;
   [0167] (iv) [D] comprises the nucleotide sequence of SEQ ID NO: 1822, or a nucleotide sequence having at least 90% (e.g., 92, 95, 96, 97, 98, or 99%) sequence identity thereto; and
   [0168] (v) [E] is absent.
[0169] 56. The viral genome of embodiment 50, wherein:
   [0170] (i) [A] comprises SEQ ID NO: 1792, or a sequence having at least sequence comprising at least one or two modifications, e.g., substitutions (e.g., conservative substitutions), relative to the nucleotide sequence of SEQ ID NO: 1792;
   [0171] (ii) [B] comprises the nucleotide sequence of SEQ ID NO: 1795, or a sequence having at least sequence comprising at least one or two, but no more than 3 modifications, e.g., substitutions (e.g., conservative substitutions), relative to the nucleotide sequence of SEQ ID NO: 1795;
   [0172] (iii) [C] comprises nucleotide sequence of SEQ ID NO: 1797, or a nucleotide sequence comprising at least one, two, or three but no more than four modifications, e.g., substitutions (e.g., conservative substitutions), relative to the nucleotide sequence of SEQ ID NO: 1797;
   [0173] (iv) [D] comprises the nucleotide sequence of SEQ ID NO: 1823, or a nucleotide sequence having at least 90% (e.g., 92, 95, 96, 97, 98, or 99%) sequence identity thereto; and
   [0174] (v) [E] comprises the nucleotide sequence of SEQ ID NO: 1798, or a sequence having at least sequence comprising at least one or two, but no more than 3 modifications, e.g., substitutions (e.g., conservative substitutions), relative to the nucleotide sequence of SEQ ID NO: 1798.
[0175] 57. The viral genome of embodiment 50, wherein:
   [0176] (i) [A] comprises SEQ ID NO: 1792, or a sequence having at least sequence comprising at least one or two modifications, e.g., substitutions (e.g., conservative substitutions), relative to the nucleotide sequence of SEQ ID NO: 1792;
   [0177] (ii) [B] comprises the nucleotide sequence of SEQ ID NO: 1795, or a sequence having at least sequence comprising at least one or two, but no more than 3 modifications, e.g., substitutions (e.g., conservative substitutions), relative to the nucleotide sequence of SEQ ID NO: 1795;
   [0178] (iii) [C] comprises the nucleotide sequence of SEQ ID NO: 1797, or a nucleotide sequence comprising at least one, two, or three but no more than four modifications, e.g., substitutions (e.g., conservative substitutions), relative to the nucleotide sequence of SEQ ID NO: 1797;
   [0179] (iv) [D] comprises the nucleotide sequence of SEQ ID NO: 1822, or a nucleotide sequence having at least 90% (e.g., 92, 95, 96, 97, 98, or 99%) sequence identity thereto; and
   [0180] (v) [E] is absent.
[0181] 58. The viral genome of embodiment 50, wherein:
   [0182] (i) [A] comprises SEQ ID NO: 1793, or a sequence having at least sequence comprising at least one, two, or three but no more than four modifications, e.g., substitutions (e.g., conservative substitutions), relative to the nucleotide sequence of SEQ ID NO: 1793; (ii) [B] comprises the nucleotide sequence of SEQ ID NO: 1795, or a sequence having at least sequence comprising at least one or two, but no more than 3 modifications, e.g., substitutions (e.g., conservative substitutions), relative to the nucleotide sequence of SEQ ID NO: 1795;
   [0183] (iii) [C] comprises the nucleotide sequence of SEQ ID NO: 1797, or a nucleotide sequence comprising at least one, two, or three but no more than four modifications, e.g., substitutions (e.g., conservative substitutions), relative to the nucleotide sequence of SEQ ID NO: 1797;
   [0184] (iv) [D] comprises the nucleotide sequence of SEQ ID NO: 1823, or a nucleotide sequence having at least 90% (e.g., 92, 95, 96, 97, 98, or 99%) sequence identity thereto; and
   [0185] (v) [E] comprises the nucleotide sequence of SEQ ID NO: 1798, or a sequence having at least sequence comprising at least one or two, but no more than 3 modifications, e.g., substitutions (e.g., conservative substitutions), relative to the nucleotide sequence of SEQ ID NO: 1798.
[0186] 59. The viral genome of embodiment 50, wherein:
   [0187] (i) [A] comprises SEQ ID NO: 1793, or a sequence having at least sequence comprising at least one, two, or three but no more than four modifications, e.g., substitutions (e.g., conservative substitutions), relative to the nucleotide sequence of SEQ ID NO: 1793;
   [0188] (ii) [B] comprises the nucleotide sequence of SEQ ID NO: 1795, or a sequence having at least sequence comprising at least one or two, but no more than 3 modifications, e.g., substitutions (e.g., conservative substitutions), relative to the nucleotide sequence of SEQ ID NO: 1795;
   [0189] (iii) [C] comprises the nucleotide sequence of SEQ ID NO: 1797, or a nucleotide sequence comprising at least one, two, or three but no more than four modifications, e.g., substitutions (e.g., conservative substitutions), relative to the nucleotide sequence of SEQ ID NO: 1797;
   [0190] (iv) [D] comprises the nucleotide sequence of SEQ ID NO: 1822, or a nucleotide sequence having at least 90% (e.g., 92, 95, 96, 97, 98, or 99%) sequence identity thereto; and
   [0191] (v) [E] is absent.
[0192] 60. The viral genome of embodiment 50, wherein:
   [0193] (i) [A] comprises SEQ ID NO: 1794, or a sequence having at least sequence comprising at least one, two, or three but no more than four modifications, e.g., substitutions (e.g., conservative substitutions), relative to the nucleotide sequence of SEQ ID NO: 1794;
   [0194] (ii) [B] comprises the nucleotide sequence of SEQ ID NO: 1795, or a sequence having at least sequence comprising at least one or two, but no more than 3 modifications, e.g., substitutions (e.g., conservative substitutions), relative to the nucleotide sequence of SEQ ID NO: 1795;
   [0195] (iii) [C] comprises the nucleotide sequence of SEQ ID NO: 1797, or a nucleotide sequence comprising at least one, two, or three but no more than four modifications, e.g., substitutions (e.g., conservative substitutions), relative to the nucleotide sequence of SEQ ID NO: 1797;
   [0196] (iv) [D] comprises the nucleotide sequence of SEQ ID NO: 1823, or a nucleotide sequence having at least 90% (e.g., 92, 95, 96, 97, 98, or 99%) sequence identity thereto; and
   [0197] (v) [E] comprises the nucleotide sequence of SEQ ID NO: 1798, or a sequence having at least sequence comprising at least one or two, but no more than 3 modifications, e.g., substitutions (e.g., conservative substitutions), relative to the nucleotide sequence of SEQ ID NO: 1798.
[0198] 61. The viral genome of embodiment 50, wherein:
   [0199] (i) [A] comprises SEQ ID NO: 1794, or a sequence having at least sequence comprising at least one, two, or three but no more than four modifications, e.g., substitutions (e.g., conservative substitutions), relative to the nucleotide sequence of SEQ ID NO: 1794;
   [0200] (ii) [B] comprises the nucleotide sequence of SEQ ID NO: 1795, or a sequence having at least sequence comprising at least one or two, but no more than 3 modifications, e.g., substitutions (e.g., conservative substitutions), relative to the nucleotide sequence of SEQ ID NO: 1795;
   [0201] (iii) [C] comprises the nucleotide sequence of SEQ ID NO: 1797, or a nucleotide sequence comprising at least one, two, or three but no more than four modifications, e.g., substitutions (e.g., conservative substitutions), relative to the nucleotide sequence of SEQ ID NO: 1797;
   [0202] (iv) [D] comprises the nucleotide sequence of SEQ ID NO: 1822, or a nucleotide sequence having at least 90% (e.g., 92, 95, 96, 97, 98, or 99%) sequence identity thereto; and
   [0203] (v) [E] is absent.
[0204] 62. The viral genome of any one of embodiments 2 or 40-41, wherein the promoter comprises an EF-1a promoter variant, e.g., a truncated EF-1a promoter, which comprises the nucleotide sequence of the WT EF-1a promoter comprising SEQ ID NO: 1781 and a deletion (e.g., a deletion of at least 10, 20, 25, 30, 50, 100, 150, 200, 250, 300, 350, 400, 450, 500, 550, 600, 650, 700, 750, 800, 850, 900, or 950 nucleotides).
[0205] 63. The viral genome of embodiment 62, wherein the deletion comprises at least 10, 20, 25, 30, 50, 100, 150, 200, 250, 300, 350, 400, 450, 500, 550, 600, 650, 700, 750, 800, 850, 900, or 950 nucleotides.
[0206] 64. The viral genome of embodiment 62 or 63, wherein the deletion is from the 3′ end of the WT EF-1a promoter, the 5′ end of the WT EF-1a promoter, both.
[0207] 65. The viral genome of any one of embodiments 2 or 40-41, wherein the promoter comprises an EF-1a promoter variant, e.g., an EF-1a truncated promoter, comprises the nucleotide sequence of SEQ ID NO: 1781 or a sequence with at least 95% identity thereto, with a fragment of the WT EF-1a promoter deleted, optionally wherein the fragment comprises nucleotides 237-1,184 of SEQ ID NO: 1781 or nucleotides 242-1,184 of SEQ ID NO: 1781.
[0208] 66. The viral genome of any one of embodiments 62-65, wherein the EF-1a promoter variant further comprises the nucleotide sequence of SEQ ID NO: 1792, 1793, or 1794, or a sequence having at least one, two, or three but no more than four modifications, e.g., substitutions (e.g., conservative substitutions), relative to the nucleotide sequence of SEQ ID NO: 1792, 1793, or 1794.
[0209] 67. The viral genome of any one of embodiments 2, 40-41, or 48-66, wherein the promoter comprises the nucleotide sequence of SEQ ID NO: 1785, 1782-1784, 1786-1791, or a sequence at least 95% identical thereto.
[0210] 68. The viral genome of any one of embodiments 2, 40-41, 48-50, 55, or 62-66, wherein the promoter comprises the nucleotide sequence of SEQ ID NO: 1785, or a sequence at least 95% identical thereto.
[0211] 69. The viral genome of any one of embodiments 2-68, which further comprises an inverted terminal repeat (ITR) sequence.
[0212] 70. The viral genome of any one of embodiments 2-69, which comprises an ITR sequence positioned 5′ relative to the transgene encoding the NPC1 protein.
[0213] 71. The viral genome of any one of embodiments 2-70, which comprises an ITR sequence positioned 3′ relative to the transgene encoding the NPC1 protein.
[0214] 72. The viral genome of any one of embodiments 2-71, which comprises an ITR sequence positioned 5′ relative to the transgene encoding the NPC1 protein and an ITR sequence positioned 3′ relative to the transgene encoding the NPC1 protein.
[0215] 73. The viral genome of any one of embodiments 69-72, wherein the ITR comprises a nucleotide sequence of SEQ ID NO: 1733, 1734, 1837, or 1838 or a nucleotide sequence at least 95% identical thereto.
[0216] 74. The viral genome of any one of embodiments 69-73, wherein:
   [0217] (i) the ITR sequence positioned 5′ relative to the transgene encoding the NPC1 protein comprises the nucleotide sequence of SEQ ID NO: 1733, or a nucleotide sequence with at least 95% sequence identity thereto; and/or the ITR sequence positioned 3′ relative to the transgene encoding the NPC1 protein comprises the nucleotide sequence of SEQ ID NO: 1734, or a nucleotide sequence with at least 95% sequence identity thereto; or
   [0218] (ii) the ITR sequence positioned 5′ relative to the transgene encoding the NPC1 protein comprises the nucleotide sequence of SEQ ID NO: 1837, or a nucleotide sequence with at least 95% sequence identity thereto; and/or the ITR sequence positioned 3′ relative to the transgene encoding the NPC1 protein comprises the nucleotide sequence of SEQ ID NO: 1838, or a nucleotide sequence with at least 95% sequence identity thereto.
[0219] 75. The viral genome of any one of embodiments 2-74, which further comprises a polyadenylation (polyA) signal region.
[0220] 76. The viral genome of embodiment 75, wherein the polyA signal region comprises the nucleotide sequence of SEQ ID NO: 1751, or a nucleotide sequence at least 95% identical thereto.
[0221] 77. The viral genome of any one of embodiments 2-76, which further comprises an intron region.
[0222] 78. The viral genome of embodiment 77, wherein the intron region comprises the nucleotide sequence of SEQ ID NO: 1780, or a nucleotide sequence at least 95% identical thereto.
[0223] 79. The viral genome of any one of embodiments 2-78, which further comprises an exon region, e.g., at least one, two, or three exon regions.
[0224] 80. The viral genome of any one of embodiments 2-79, which further comprises a Kozak sequence.
[0225] 81. The viral genome of embodiment 80, wherein the Kozak sequence comprises SEQ ID NO: 1746, or a nucleotide sequence comprising at least one, two, or three but no more than four modifications, e.g., substitutions (e.g., conservative substitutions), relative to the nucleotide sequence of SEQ ID NO: 1746.
[0226] 82. The viral genome of any one of embodiments 2-81, which further comprises a nucleotide sequence encoding a miR binding site, e.g., a miR binding site that modulates, e.g., reduces, expression of the payload encoded by the viral genome in a cell or tissue where the corresponding miRNA is expressed.
[0227] 83. The viral genome of embodiment 82, wherein the encoded miRNA binding site is complementary, e.g., fully complementary or partially complementary, to a miRNA expressed in a cell or tissue of the DRG, liver, hematopoietic, or a combination thereof.
[0228] 84. The viral genome of embodiment 82 or 83, which comprises at least 1-5 copies of an encoded miR binding site, e.g., at least 1, 2, 3, 4, or 5 copies.
[0229] 85. The viral genome of any one of embodiments 82-84, which comprises at least 3 copies of an encoded miR binding sites, optionally wherein all three copies comprise the same miR binding site, or at least one, two, or all of the copies comprise a different miR binding site.
[0230] 86. The viral genome of embodiment 85, wherein the 3 copies of the encoded miR binding sites are continuous (e.g., not separated by a spacer), or are separated by a spacer, optionally wherein the spacer comprises the nucleotide sequence of SEQ ID NO: 1846, or a nucleotide sequence having at least one, two, or three modifications, but no more than four modifications of SEQ ID NO: 1846.
[0231] 87. The viral genome of any one of embodiments 82-84, which comprises at least 4 copies of an encoded miR binding site, optionally wherein all four copies comprise the same miR binding site, or at least one, two, three, or all of the copies comprise a different miR binding site.
[0232] 88. The viral genome of embodiment 87, wherein the 4 copies of the encoded miR binding sites are continuous (e.g., not separated by a spacer), or are separated by a spacer, optionally wherein the spacer comprises the nucleotide sequence of SEQ ID NO: 1846, or a nucleotide sequence having at least one, two, or three modifications, but no more than four modifications of SEQ ID NO: 1846.
[0233] 89. The viral genome of any one of embodiments 82-88, wherein the encoded miR binding site comprises a miR122 binding site, a miR183 binding site, a miR-142-3p, or a combination thereof, optionally wherein:
   [0234] (i) the encoded miR122 binding site comprises the nucleotide sequence of SEQ ID NO: 1840, or a nucleotide sequence substantially identical (e.g., having at least 70%, 75%, 80%, 85%, 90%, 92%, 95%, 97%, 98%, or 99% sequence identity) thereto; or a nucleotide sequence having at least one, two, three, four, five, six, or seven modifications, but no more than ten modifications of SEQ ID NO: 1840;
   [0235] (ii) the encoded miR183 binding site comprises the nucleotide sequence of SEQ ID NO: 1843, or a nucleotide sequence substantially identical (e.g., having at least 70%, 75%, 80%, 85%, 90%, 92%, 95%, 97%, 98%, or 99% sequence identity) thereto; or a nucleotide sequence having at least one, two, three, four, five, six, or seven modifications, but no more than ten modifications of SEQ ID NO: 1843; and/or
   [0236] (iii) the encoded miR-142-3p binding site comprises the nucleotide sequence of SEQ ID NO: 1842, or a nucleotide sequence substantially identical (e.g., having at least 70%, 75%, 80%, 85%, 90%, 92%, 95%, 97%, 98%, or 99% sequence identity) thereto; or a nucleotide sequence having at least one, two, three, four, five, six, or seven modifications, but no more than ten modifications of SEQ ID NO: 1842.
[0237] 90. The viral genome of any one of embodiments 2-89, wherein the viral genome comprises an encoded miR183 binding site.
[0238] 91. The viral genome of any one of embodiments 2-90, wherein the viral genome comprises at least 1-5 copies, e.g., 1, 2, or 3 copies of a miR183 binding site, optionally wherein each copy is continuous (e.g., not separated by a spacer), or each copy is separated by a spacer, optionally wherein the spacer comprises the nucleotide sequence of SEQ ID NO: 1846, or a nucleotide sequence having at least one, two, or three modifications, but no more than four modifications of SEQ ID NO: 1846.
[0239] 92. The viral genome of embodiment 90 or 91, wherein the encoded miR183 binding site comprises the nucleotide sequence of SEQ ID NO: 1843, or a nucleotide sequence substantially identical (e.g., having at least 70%, 75%, 80%, 85%, 90%, 92%, 95%, 97%, 98%, or 99% sequence identity) thereto; or a nucleotide sequence having at least one, two, three, four, five, six, or seven modifications, but no more than ten modifications of SEQ ID NO: 1843.
[0240] 93. The viral genome of any one of embodiments 2-93, wherein the viral genome comprises:
[0241] (A) (i) a first encoded miR183 binding site comprising the nucleotide sequence of SEQ ID NO: 1843, or a nucleotide sequence substantially identical (e.g., having at least 70%, 75%, 80%, 85%, 90%, 92%, 95%, 97%, 98%, or 99% sequence identity) thereto; or a nucleotide sequence having at least one, two, three, four, five, six, or seven modifications, but no more than ten modifications of SEQ ID NO: 1843;
   [0242] (ii) a first spacer comprising the nucleotide sequence of SEQ ID NO: 1846, or a nucleotide sequence having at least one, two, or three modifications, but no more than four modifications of SEQ ID NO: 1846; and
   [0243] (iii) a second encoded miR183 binding site comprising the nucleotide sequence of SEQ ID NO: 1843, or a nucleotide sequence substantially identical (e.g., having at least 70%, 75%, 80%, 85%, 90%, 92%, 95%, 97%, 98%, or 99% sequence identity) thereto; or a nucleotide sequence having at least one, two, three, four, five, six, or seven modifications, but no more than ten modifications of SEQ ID NO: 1843; or
[0244] (B) (i) a first encoded miR183 binding site comprising the nucleotide sequence of SEQ ID NO: 1843, or a nucleotide sequence substantially identical (e.g., having at least 70%, 75%, 80%, 85%, 90%, 92%, 95%, 97%, 98%, or 99% sequence identity) thereto; or a nucleotide sequence having at least one, two, three, four, five, six, or seven modifications, but no more than ten modifications of SEQ ID NO: 1843;
   [0245] (ii) a first spacer comprising the nucleotide sequence of SEQ ID NO: 1846, or a nucleotide sequence having at least one, two, or three modifications, but no more than four modifications of SEQ ID NO: 1846;
   [0246] (iii) a second encoded miR183 binding site comprising the nucleotide sequence of SEQ ID NO: 1843, or a nucleotide sequence substantially identical (e.g., having at least 70%, 75%, 80%, 85%, 90%, 92%, 95%, 97%, 98%, or 99% sequence identity) thereto; or a nucleotide sequence having at least one, two, three, four, five, six, or seven modifications, but no more than ten modifications of SEQ ID NO: 1843;
   [0247] (iv) a second spacer comprising the nucleotide sequence of SEQ ID NO: 1846, or a nucleotide sequence having at least one, two, or three modifications, but no more than four modifications of SEQ ID NO: 1846; and
   [0248] (v) a third encoded miR183 binding site comprising the nucleotide sequence of SEQ ID NO: 1843, or a nucleotide sequence substantially identical (e.g., having at least 70%, 75%, 80%, 85%, 90%, 92%, 95%, 97%, 98%, or 99% sequence identity) thereto; or a nucleotide sequence having at least one, two, three, four, five, six, or seven modifications, but no more than ten modifications of SEQ ID NO: 1843.
[0249] 94. The viral genome of any one of embodiments 2-93, which is single stranded.
[0250] 95. A viral genome comprising in 5′ to 3′ order:
   [0251] (i) a 5′ adeno-associated (AAV) ITR, optionally wherein the 5′ AAV ITR comprises the nucleotide sequence of SEQ ID NO: 1733, or a nucleotide sequence at least 95% identical thereto;
   [0252] (ii) an EF-1a promoter variant, optionally wherein the EF-1a promoter variant comprises the nucleotide sequence of SEQ ID NO: 1785, or a nucleotide sequence at least 95% identical thereto;
   [0253] (iii) a Kozak sequence, optionally wherein the Kozak sequence comprises SEQ ID NO: 1746, or a nucleotide sequence comprising at least one, two, or three but no more than four modifications, e.g., substitutions (e.g., conservative substitutions), relative to the nucleotide sequence of SEQ ID NO: 1746;
   [0254] (iv) a transgene encoding an NPC1 protein encoded by a nucleotide sequence comprising a nucleotide sequence, e.g., a codon optimized nucleotide sequence, comprising a nucleotide sequence with at least 85% (e.g., at least about 90, 92, 95, 96, 97, 98, or 99%) sequence identity to the nucleotide sequence of SEQ ID NO: 1750;
   [0255] (v) a polyA signal region, optionally wherein the polyA signal region comprises the nucleotide sequence of SEQ ID NO: 1751, or a nucleotide sequence at least 95% identical thereto; and
   [0256] (vi) a 3′ AAV ITR, optionally wherein the 3′ AAV ITR comprises the nucleotide sequence of SEQ ID NO: 1734, or a nucleotide sequence at least 95% identical thereto.
[0257] 96. A viral genome comprising in 5′ to 3′ order:
   [0258] (i) a 5′ adeno-associated (AAV) ITR, optionally wherein the 5′ AAV ITR comprises the nucleotide sequence of SEQ ID NO: 1733, or a nucleotide sequence at least 95% identical thereto;
   [0259] (ii) an EF-1a promoter variant, optionally wherein the EF-1a promoter variant comprises the nucleotide sequence of SEQ ID NO: 1785, or a nucleotide sequence at least 95% identical thereto;
   [0260] (iii) an intron region, optionally wherein the intron region comprises the nucleotide sequence of SEQ ID NO: 1780, or a nucleotide sequence at least 95% identical thereto;
   [0261] (iv) a transgene encoding an NPC1 protein encoded by a nucleotide sequence comprising a nucleotide sequence, e.g., a codon optimized nucleotide sequence, comprising a nucleotide sequence with at least 85% (e.g., at least about 90, 92, 95, 96, 97, 98, or 99%) sequence identity to the nucleotide sequence of SEQ ID NO: 1750;
   [0262] (v) a polyA signal region, optionally wherein the polyA signal region comprises the nucleotide sequence of SEQ ID NO: 1751, or a nucleotide sequence at least 95% identical thereto; and
   [0263] (vi) a 3′ AAV ITR, optionally wherein the 3′ AAV ITR comprises the nucleotide sequence of SEQ ID NO: 1734, or a nucleotide sequence at least 95% identical thereto.
[0264] 97. A viral genome comprising in 5′ to 3′ order:
   [0265] (i) a 5′ adeno-associated (AAV) ITR, optionally wherein the 5′ AAV ITR comprises the nucleotide sequence of SEQ ID NO: 1733, or a nucleotide sequence at least 95% identical thereto;
   [0266] (ii) a CMV promoter variant, optionally wherein the CMV promoter comprises the nucleotide sequence of SEQ ID NO: 1736, or a nucleotide sequence at least 95% identical thereto;
   [0267] (iii) a Kozak sequence, optionally wherein the Kozak sequence comprises SEQ ID NO: 1746, or a nucleotide sequence comprising at least one, two, or three but no more than four modifications, e.g., substitutions (e.g., conservative substitutions), relative to the nucleotide sequence of SEQ ID NO: 1746;
   [0268] (iv) a transgene encoding an NPC1 protein encoded by a nucleotide sequence comprising a nucleotide sequence, e.g., a codon optimized nucleotide sequence, comprising a nucleotide sequence with at least 85% (e.g., at least about 90, 92, 95, 96, 97, 98, or 99%) sequence identity to the nucleotide sequence of SEQ ID NO: 1750;
   [0269] (v) a polyA signal region, optionally wherein the polyA signal region comprises the nucleotide sequence of SEQ ID NO: 1751, or a nucleotide sequence at least 95% identical thereto; and
   [0270] (vi) a 3′ AAV ITR, optionally wherein the 3′ AAV ITR comprises the nucleotide sequence of SEQ ID NO: 1734, or a nucleotide sequence at least 95% identical thereto.
[0271] 98. A viral genome comprising in 5′ to 3′ order:
   [0272] (i) a 5′ adeno-associated (AAV) ITR, optionally wherein the 5′ AAV ITR comprises the nucleotide sequence of SEQ ID NO: 1733, or a nucleotide sequence at least 95% identical thereto;
   [0273] (ii) a CMV promoter variant, optionally wherein the CMV promoter comprises the nucleotide sequence of SEQ ID NO: 1736, or a nucleotide sequence at least 95% identical thereto;
   [0274] (iii) an intron region, optionally wherein the intron region comprises the nucleotide sequence of SEQ ID NO: 1780, or a nucleotide sequence at least 95% identical thereto;
   [0275] (iv) a Kozak sequence, optionally wherein the Kozak sequence comprises SEQ ID NO: 1746, or a nucleotide sequence comprising at least one, two, or three but no more than four modifications, e.g., substitutions (e.g., conservative substitutions), relative to the nucleotide sequence of SEQ ID NO: 1746;
   [0276] (v) a transgene encoding an NPC1 protein encoded by a nucleotide sequence comprising a nucleotide sequence, e.g., a codon optimized nucleotide sequence, comprising a nucleotide sequence with at least 85% (e.g., at least about 90, 92, 95, 96, 97, 98, or 99%) sequence identity to the nucleotide sequence of SEQ ID NO: 1750;
   [0277] (vi) a polyA signal region, optionally wherein the polyA signal region comprises the nucleotide sequence of SEQ ID NO: 1751, or a nucleotide sequence at least 95% identical thereto; and
   [0278] (vii) a 3′ AAV ITR, optionally wherein the 3′ AAV ITR comprises the nucleotide sequence of SEQ ID NO: 1734, or a nucleotide sequence at least 95% identical thereto.
[0279] 99. The viral genome of any one of embodiments 2-95, which comprises the nucleotide sequence of SEQ ID NO: 1799, or a nucleotide sequence at least 95% identical thereto.
[0280] 100. The viral genome of any one of embodiments 2-94 or 96, which comprises the nucleotide sequence of SEQ ID NO: 1800, or a nucleotide sequence at least 95% identical thereto.
[0281] 101. The viral genome of any one of embodiments 2-94 or 97, which comprises the nucleotide sequence of SEQ ID NO: 1801, or a nucleotide sequence at least 95% identical thereto.
[0282] 102. The viral genome of any one of embodiments 2-94 or 98, which comprises the nucleotide sequence of SEQ ID NO: 1802, or a nucleotide sequence at least 95% identical thereto.
[0283] 103. The viral genome of any one of embodiments 2, 4-7, 9-11, 12-94, which comprises the nucleotide sequence of SEQ ID NO: 1755, 1757, 1803-1087, 1810-1812, 1815-1816, 1824, 1827, 1828, or 1830-1831, or a nucleotide sequence at least 95% identical thereto.
[0284] 104. The viral genome of any one of embodiments 3-94, which comprises the nucleotide sequence of SEQ ID NO: 1814-1821, 1825-1828, or a nucleotide sequence at least 95% identical thereto.
[0285] 105. An isolated, e.g., recombinant, vial genome comprising a promoter operably linked to a nucleic acid comprising a transgene encoding an NPC1 protein, wherein:
   [0286] (i) the promoter is chosen from a CMV promoter, CBA promoter, or functional variant thereof, optionally wherein the CMV promoter or functional variant thereof is chosen from any one of SEQ ID NOs: 1736 or 1739-1741, and/or the CBA promoter, or functional variant thereof is chosen from SEQ ID NO: 1735 or 1738; and
   [0287] (ii) the nucleotide sequence encoding the NPC1 protein comprises the nucleotide sequence of SEQ ID NO: 1747, or a nucleotide sequence at least 85% (e.g., 90, 92, 95, 96, 97, 98, 99%) identical thereto.
[0288] 106. An isolated, e.g., recombinant, vial genome comprising a promoter operably linked to a nucleic acid comprising a transgene encoding an NPC1 protein, wherein:
   [0289] (i) the promoter is chosen from a CMV promoter, CBA promoter, or functional variant thereof, optionally wherein the CMV promoter or functional variant thereof is chosen from any one of SEQ ID NOs: 1736 or 1739-1741, and/or the CBA promoter, or functional variant thereof is chosen from SEQ ID NO: 1735 or 1738; and
   [0290] (ii) the nucleotide sequence encoding the NPC1 protein comprises the nucleotide sequence of SEQ ID NO: 1747, 1749, or 1750, or a nucleotide sequence at least 85% (e.g., 90, 92, 95, 96, 97, 98, 99%) identical thereto.
[0291] 107. The viral genome of embodiment 105, wherein the viral genome comprises the nucleotide sequence of any of SEQ ID NOs: 1752, 1756, 1758-1759, 1808-1809, 1829, or 1833-1836, or a nucleotide sequence at least 95% identical thereto.
[0292] 108. An isolated, e.g., recombinant, vial genome comprising the nucleotide sequence of any of SEQ ID NOs: 1753-1754, 1813, or 1832, or a nucleotide sequence at least 95% identical thereto.
[0293] 109. The viral genome of any one of embodiments 2-108, which further comprises a nucleic acid encoding a capsid protein, e.g., a structural protein, wherein the capsid protein comprises a VP1 polypeptide, a VP2 polypeptide, and/or a VP3 polypeptide.
[0294] 110. The viral genome of embodiment 109, wherein the VP1 polypeptide, the VP2 polypeptide, and/or the VP3 polypeptide are encoded by at least one Cap gene.
[0295] 111. The viral genome of any one of embodiments 2-110, which further comprises a nucleic acid encoding a Rep protein, e.g., a non-structural protein, wherein the Rep protein comprises a Rep78 protein, a Rep68, Rep52 protein, and/or a Rep40 protein.
[0296] 112. The viral genome of embodiment 111, wherein the Rep78 protein, the Rep68 protein, the Rep52 protein, and/or the Rep40 protein are encoded by at least one Rep gene.
[0297] 113. An isolated, e.g., recombinant, NPC1 protein encoded by the viral genome of any one of embodiments 2-112 or the isolated nucleic acid of embodiment 1.
[0298] 114. An isolated, e.g., recombinant, AAV particle comprising:
   [0299] (i) a capsid protein; and
   [0300] (ii) the viral genome of any one of embodiments 2-112.
[0301] 115. The AAV particle of embodiment 114, wherein:
   [0302] (i) the capsid protein comprises the amino acid sequence of SEQ ID NO: 138, or an amino acid sequence with at least 80% (e.g., at least about 85, 90, 95, 96, 97, 98, or 99%) sequence identity thereto;
   [0303] (ii) the capsid protein comprises an amino acid sequence having at least one, two or three modifications but not more than 30, 20 or 10 modifications of the amino acid sequence of SEQ ID NO: 138;
   [0304] (iii) the capsid protein comprises the amino acid sequence of SEQ ID NO: 11, or an amino acid sequence with at least 80% (e.g., at least about 85, 90, 95, 96, 97, 98, or 99%) sequence identity thereto;
   [0305] (iv) the capsid protein comprises an amino acid sequence having at least one, two or three modifications but not more than 30, 20 or 10 modifications of the amino acid sequence of SEQ ID NO: 11;
   [0306] (v) the capsid protein comprises an amino acid sequence encoded by the nucleotide sequence of SEQ ID NO: 137, or a sequence with at least 80% (e.g., at least about 85, 90, 95, 96, 97, 98, or 99%) sequence identity thereto; and/or
   [0307] (vi) the nucleotide sequence encoding the capsid protein comprises the nucleotide sequence of SEQ ID NO: 137, or a sequence with at least 80% (e.g., at least about 85, 90, 95, 96, 97, 98, or 99%) sequence identity thereto.
[0308] 116. The AAV particle of embodiment 114 or 115, wherein the capsid protein comprises:
   [0309] (i) an amino acid substitution at position K449, e.g., a K449R substitution, numbered according to SEQ ID NO:138;
   [0310] (ii) an insert comprising the amino acid sequence of TLAVPFK (SEQ ID NO: 1262), optionally wherein the insert is present immediately subsequent to position 588, relative to a reference sequence numbered according to SEQ ID NO:138;
   [0311] (iii) an amino acid other than “A” at position 587 and/or an amino acid other than “Q” at position 588, numbered according to SEQ ID NO: 138;
   [0312] (iv) the amino acid substitution of A587D and/or Q588G, numbered according to SEQ ID NO:138.
[0313] 117. The AAV particle of any one of embodiments 114-116, wherein the capsid protein comprises (i) the amino acid substitution of K449R numbered according to SEQ ID NO:138; and (ii) an insert comprising the amino acid sequence of TLAVPFK (SEQ ID NO: 1262), optionally wherein the insert is present immediately subsequent to position 588 of SEQ ID NO:138.
[0314] 118. The AAV particle of any one of embodiments 114-116, wherein the capsid protein comprises (i) the amino acid substitution of K449R numbered according to SEQ ID NO:138; (ii) an insert comprising the amino acid sequence of TLAVPFK (SEQ ID NO: 1262), optionally wherein the insert is present immediately subsequent to position 588, relative to a reference sequence numbered according to SEQ ID NO:138; and (iii) the amino acid substitutions of A587D and Q588G, numbered according to SEQ ID NO:138.
[0315] 119. The AAV particle of any one of embodiments 114-116, wherein the capsid protein comprises (i) an insert comprising the amino acid sequence of TLAVPFK (SEQ ID NO: 1262), optionally wherein the insert is present immediately subsequent to position 588, relative to a reference sequence numbered according to SEQ ID NO:138; and (ii) the amino acid substitutions of A587D and Q588G, numbered according to SEQ ID NO:138.
[0316] 120. The AAV particle of any one of embodiments 114-119, wherein the capsid protein comprises any of the capsid proteins listed in Table 1 or a functional variant thereof.
[0317] 121. The AAV particle of any one of embodiments 114-120, wherein the capsid protein comprises a VOY101, VOY201, AAVPHP.N (PHP.N), AAVPHP.B (PHP.B), AAVPHP.A (PHP.A), PHP.B2, PHP.B3, G2B4, G2B5, AAV9, AAVrh10, or a functional variant thereof.
[0318] 122. The AAV particle of embodiment 114-121, wherein:
   [0319] (i) the capsid protein comprises the amino acid sequence of SEQ ID NO: 1, or an amino acid sequence substantially identical (e.g., having at least 70%, 75%, 80%, 85%, 90%, 92%, 95%, 97%, 98%, or 99% sequence identity) thereto;
   [0320] (ii) the capsid protein comprises an amino acid sequence comprising at least one, two, or three modifications but no more than 30, 20, or 10 modifications, e.g., substitutions, relative to the amino acid sequence of SEQ ID NO: 1;
   [0321] (iii) the capsid protein comprises an amino acid sequence encoded by the nucleotide sequence of SEQ ID NO: 2 or a nucleotide sequence substantially identical (e.g., having at least 70%, 75%, 80%, 85%, 90%, 92%, 95%, 97%, 98%, or 99% sequence identity) thereto; and/or
   [0322] (iv) the nucleotide sequence encoding the capsid protein comprises the nucleotide sequence of SEQ ID NO: 2, or a nucleotide sequence substantially identical (e.g., having at least 70%, 75%, 80%, 85%, 90%, 92%, 95%, 97%, 98%, or 99% sequence identity) thereto.
[0323] 123. The AAV particle of any one of embodiments 114-116 or 120-121, wherein the capsid protein comprises:
   [0324] (i) a VP1 polypeptide, VP2 polypeptide, VP3 polypeptide, or a combination thereof;
   [0325] (ii) the amino acid sequence corresponding to positions 138-736, e.g., a VP2, of SEQ ID NO: 138, or a sequence with at least 80% (e.g., at least about 85, 90, 92, 95, 96, 97, 98, or 99%) sequence identity thereto;
   [0326] (iii) the amino acid sequence corresponding to positions 203-736, e.g., a VP3, of SEQ ID NO: 138, or a sequence with at least 80% (e.g., at least about 85, 90, 92, 95, 96, 97, 98, or 99%) sequence identity thereto; and/or
   [0327] (iv) the amino acid sequence corresponding to positions 1-736, e.g., a VP1, of SEQ ID NO: 138, or a sequence with at least 80% (e.g., at least about 85, 90, 92, 95, 96, 97, 98, or 99%) sequence identity thereto.
[0328] 124. The AAV particle of any one of embodiments 114-116, 120-121, or 123, wherein the nucleotide sequence encoding the capsid protein comprises:
   [0329] (i) a CTG initiation codon; and/or
   [0330] (ii) the nucleotide sequence of SEQ ID NO: 137 which comprises 3-20 mutations, e.g., substitutions, e.g., 3-15 mutations, 3-10 mutations, 3-5 mutations, 5-20 mutations, 5-15 mutations, 5-10 mutations, 10-20 mutations, 10-15 mutations, 15-20 mutations, 3 mutations, 5 mutations, 10 mutations, 12 mutations, 15 mutations, 18 mutations, or 20 mutations.
[0331] 125. A vector comprising the viral genome of any one of embodiments 2-112 or the nucleic acid of embodiment 1.
[0332] 126. A cell comprising the viral genome of any one of embodiments 2-112, the viral particle of any one of embodiments 114-124, or the vector of embodiment 125.
[0333] 127. The cell of embodiment 126, which a mammalian cell, e.g., an HEK293 cell, an insect cell, e.g., an Sf9 cell, or a bacterial cell.
[0334] 128. A nucleic acid comprising the viral genome of any one of embodiments 2-112 or the isolated nucleic acid of embodiment 1, and a backbone region suitable for replication of the viral genome in a cell, e.g., a bacterial cell (e.g., wherein the backbone region comprises one or both of a bacterial origin of replication and a selectable marker).
[0335] 129. The nucleic acid of embodiment 128, wherein the viral genome comprises a nucleotide sequence of any one of SEQ ID NOs: 1799-1082, 1752-1759, 1803-1821, or 1824-1830.
[0336] 130. A method of making a viral genome, the method comprising:
   [0337] (i) providing the nucleic acid molecule comprising the viral genome embodiment 128 or 129 or a nucleic acid encoding the viral genome of any one of embodiments 2-112; and
   [0338] (ii) excising the viral genome from the backbone region, e.g., by cleaving the nucleic acid molecule at upstream and downstream of the viral genome.
[0339] 131. A method of making an isolated, e.g., recombinant, AAV particle, the method comprising
   [0340] (i) providing a host cell comprising the viral genome of any one of embodiments 2-112 or the nucleic acid encoding the viral genome of embodiment 128 or 129; and
   [0341] (ii) incubating the host cell under conditions suitable to enclose the viral genome in a capsid protein, e.g., an AAV9 capsid protein;
   [0342] thereby making the isolated AAV particle.
[0343] 132. The method of embodiment 131, further comprising, prior to step (i), introducing a first nucleic acid molecule comprising the viral genome into the host cell.
[0344] 133. The method of embodiment 131 or 132, wherein the host cell comprises a second nucleic acid encoding a capsid protein, e.g., an AAV9 capsid protein.
[0345] 134. The method of embodiment 133, further comprising introducing the second nucleic acid into the cell.
[0346] 135. The method of any of embodiments 131-134, wherein the second nucleic acid molecule is introduced into the host cell prior to, concurrently with, or after the first nucleic acid molecule.
[0347] 136. The method of any one of embodiments 131-135, wherein the host cell comprises a mammalian cell, e.g., an HEK293 cell, an insect cell, e.g., an Sf9 cell, or a bacterial cell.
[0348] 137. A pharmaceutical composition comprising the AAV particle of any one of embodiments 114-124, or an AAV particle comprising the viral genome of any one of embodiments 2-112, and a pharmaceutically acceptable excipient.
[0349] 138. A method of delivering an exogenous NPC1 protein to a subject, comprising administering an effective amount of the pharmaceutical composition of embodiment 137, the AAV particle of any one of embodiments 114-124, or an AAV particle comprising the viral genome of any one of embodiments 2-112.
[0350] 139. The method of embodiment 138, wherein the subject has, has been diagnosed with having, or is at risk of having a disease associated with expression of NPC1, e.g., aberrant or reduced NPC1 expression, e.g., expression of an NPC1 gene, NPC1 mRNA, and/or NPC1 protein.
[0351] 140. The method of embodiment 138 or 139, wherein the subject has, has been diagnosed with having, or is at risk of having a lysosomal storage disease or Niemann-Pick disease, type C1.
[0352] 141. A method of treating a subject having or diagnosed with having a disease associated with NPC1 expression comprising administering to the subject an effective amount of the pharmaceutical composition of embodiment 137, the AAV particle of any one of embodiments 114-124, or an AAV particle comprising the viral genome of any one of embodiments 2-112, thereby treating the disease associated with NPC1 expression in the subject.
[0353] 142. A method of treating a subject having or diagnosed with having a lysosomal storage disease, comprising administering to the subject an effective amount of the pharmaceutical composition of embodiment 137, the AAV particle of any one of embodiments 114-124, or an AAV particle comprising the viral genome of any one of embodiments 2-112, thereby treating the lysosomal storage disease in the subject.
[0354] 143. The method of embodiment 141 or 142, wherein the disease associated with NPC1 expression or the lysosomal storage disease is Niemann-Pick disease, type C1.
[0355] 144. The method of embodiment 143, wherein the Niemann-Pick disease, type C1 is neonate onset Niemann-Pick disease, type C1 or juvenile onset Niemann-Pick disease, type C1.
[0356] 145. A method of treating a subject having or diagnosed with having a Niemann-Pick disease, type C1 comprising administering to the subject an effective amount of the pharmaceutical composition of embodiment 137, the AAV particle of any one of embodiments 114-124, or an AAV particle comprising the viral genome of any one of embodiments 2-112, thereby treating the Niemann-Pick disease, type C1 in the subject.
[0357] 146. The method of any one of embodiments 141-145, wherein treating comprises prevention of progression of the disease in the subject.
[0358] 147. The method of any one of embodiments 141-146, wherein treating results in amelioration of at least one symptom of the disease associated with NPC1 expression, the lysosomal storage disease, and/or Niemann-Pick disease, type C1 in the subject.
[0359] 148. The method of embodiment 147, wherein the symptom of the disease associated with NPC1 expression, the lysosomal storage disease, and/or Niemann-Pick disease, type C1 in the subject comprises accumulation of unesterified cholesterol, impaired cholesterol metabolism, cognitive impairment, muscular impairment, physical impairment, sensory impairment, delayed development (e.g., delayed onset of developmental milestones), impaired brain function and/or resting brain function, reduced body max, aberrant levels of neurodegeneration biomarkers (e.g., biofluid (plasma/CSF) markers of neurodegeneration (e.g., NfL)), seizures, and/or reduced brain volume.
[0360] 149. The method of any one of embodiments 138-124, wherein the subject is a human.
[0361] 150. The method of any one of embodiments 138-125, wherein the subject comprises a mutation in the NPC1 gene, NPC1 mRNA, and/or NPC1 protein.
[0362] 151. The method of any one of embodiments 138-150, wherein the subject is a perinatal or neonatal subject, e.g., between 0 to 3 months of age.
[0363] 152. The method of any one of embodiments 138-150, wherein the subject is between 3 months to 2 years of age, e.g., an early infantile subject.
[0364] 153. The method of any one of embodiments 138-150, wherein the subject is between 2 years of age to 6 years of age, e.g., a late infantile subject.
[0365] 154. The method of any one of embodiments 138-150, wherein the subject is between 6 years of age to 15 years of age, e.g., a juvenile.
[0366] 155. The method of any one of embodiments 138-150, wherein the subject is above 15 years of age, e.g., an adult.
[0367] 156. The method of any one of embodiments 138-155, wherein the AAV particle is administered to the subject intramuscularly, intravenously, intracerebrally, intrathecally, intracerebroventricularly, via intraparenchymal administration, via focused ultrasound (FUS), e.g., coupled with the intravenous administration of microbubbles (FUS-MB), or MRI-guided FUS coupled with intravenous administration, or via intra-cisterna magna injection (ICM).
[0368] 157. The method of any one of embodiments 138-156, wherein the AAV particle is administered to the subject via intravenous administration, optionally wherein the intravenous administration is via focused ultrasound (FUS), e.g., coupled with the intravenous administration of microbubbles (FUS-MB), or MRI-guided FUS coupled with intravenous administration.
[0369] 158. The method of any one of embodiments 138-157, wherein the AAV particle is administered to a cell, tissue, or region of the CNS, e.g., a region of the brain, e.g., the parenchyma, the cortex, cerebellum, corpus callosum, brain stem caudate-putamen, thalamus, superior colliculus, or a combination thereof.
[0370] 159. The method of any one of embodiments 138-158, further comprising performing a blood test, an imaging test, a CNS biopsy sample, or an aqueous cerebral spinal fluid biopsy.
[0371] 160. The method of any one of embodiments 138-159, which further comprises evaluating, e.g., measuring, the level of NPC1 expression, e.g., NPC1 gene, NPC1 mRNA, and/or NPC1 protein expression in a subject, e.g., in a cell or tissue of the subject, optionally wherein the level of NPC1 protein is measured by an assay described herein, e.g., an ELISA, a Western blot, or an immunohistochemistry assay.
[0372] 161. The method of embodiment 160, wherein measuring the level of NPC1 expression is performed prior to, during, or subsequent to treatment with the AAV particle.
[0373] 162. The method of embodiment 160 or 161, wherein the cell is a cell of the central nervous system (e.g., parenchyma).
[0374] 163. The method of any one of embodiments 138-162, wherein the administration results in increased level of NPC1 protein expression (e.g., 2-fold, 3-fold, 4-fold, 5-fold, 6-fold, 7-fold, 8-fold, 9-fold, 10-fold, 15-fold, 20-fold more NPC protein expression) in a cell of the subject (e.g., a cell of the CNS, e.g., a cell of the cortex, hippocampus, cerebellum, or brainstem), relative to reference level, e.g., a subject that has not received treatment, e.g., has not been administered the AAV particle.
[0375] 164. The method of any one of embodiments 138-163, wherein administration results in a reduction of cholesterol accumulation in CNS cells (e.g. as measured by filipin staining, HP-β-Calbindin D staining, mass spectrometry, and quantification), as compared to a reference level, e.g., a subject that has not received treatment, e.g., has not been administered the AAV particle.
[0376] 165. The method of any one of embodiments 138-164, wherein administration results in improved results in percentage of Motor Milestones Responders on Hammersmith Infant Neurological Examination (HINE) assessment, improved rate of slowing or normalization of age appropriate development milestones, improved Child Brain Function including Resting Brain Function (Alpha, Gamma and Theta power, Decreased Seizure count), improved Body Mass Index, improved readouts of neurodegeneration biomarkers including biofluid (plasma/CSF) markers of neurodegeneration (e.g., NfL), improved neurologic and/or functional readouts such as Inventory of Non-Ataxia Signs (INAS), SCA Functional Index or SARA, or a combination thereof in the subject, as compared to a reference level, e.g., a subject that has not received treatment, e.g., has not been administered the AAV particle.
[0377] 166. The method of any one of embodiments 138-165, further comprising administration of an additional therapeutic agent and/or therapy suitable for treatment or prevention of the disease associated with NPC1 expression, the lysosomal storage disease, and/or Niemann-Pick disease, type C1.
[0378] 167. The method of embodiment 166, wherein the additional therapeutic agent and/or therapy comprises TRAPPSOL CYCLO, VTS-270 (e.g., a 2-hydroxypropyl-β-cyclodextrin (HPβCD) mixture), arimoclomol (e.g., arimoclomol citrate), or a combination thereof.
[0379] 168. The isolated viral genome of any one of embodiments 2-112, the AAV particle of any one of embodiments 114-124, or the pharmaceutical composition of embodiment 137, for use in the manufacture of a medicament.
[0380] 169. The isolated viral genome of any one of embodiments 2-112, the AAV particle of any one of embodiments 114-124, or the pharmaceutical composition of embodiment 137, for use in the treatment of a disease associated with NPC1 expression, the lysosomal storage disease, and/or Niemann-Pick disease, type C1.
[0381] 170. Use of an effective amount of an AAV particle comprising the genome of any one of embodiments 2-112, the AAV particle of any one of embodiments 114-124, or the pharmaceutical composition of embodiment 137, in the manufacture of a medicament for the treatment of a disease associated with NPC1 expression, the lysosomal storage disease, and/or Niemann-Pick disease, type C1.
[0382] 171. An adeno-associated viral (AAV) vector genome comprising: a 5′ inverted terminal repeat (ITR), a promoter, a payload region, and a 3′ ITR; wherein the payload region encodes an NPC protein.
[0383] 172. The AAV vector genome of embodiment 171, wherein the NPC protein is a human (Homo sapiens) NPC protein.
[0384] 173. The AAV vector genome of embodiment 171, wherein the amino acid sequence of the NPC protein has at least 80%, at least 85%, at least 90%, at least 95%, or at least 99% sequence identity to an NPC protein as provided in Table 2.
[0385] 174. The AAV vector genome of embodiment 171, wherein the NPC protein has an amino acid sequence of an NPC protein as provided in Table 2.
[0386] 175. The AAV vector genome of embodiment 171, wherein the nucleic acid sequence encoding the NPC protein has at least 80%, at least 85%, at least 90%, at least 95%, or at least 99% sequence identity to a nucleic acid sequence as provided in Table 2, or a fragment thereof.
[0387] 176. The AAV vector genome of embodiment 171, wherein the nucleic acid sequence encoding the NPC protein comprises SEQ ID NO: 1724 or a fragment thereof.
[0388] 177. The AAV vector genome of embodiment 171, wherein the NPC protein is a cynomolgus (Macaca fascicularis) NPC protein.
[0389] 178. The AAV vector genome of embodiment 171, wherein the NPC protein is a rhesus macaque (Macaca mulatta) NPC protein.
[0390] 179. The AAV vector genome of any one of embodiments 177-178, wherein the NPC protein is at least partially humanized.
[0391] 180. The AAV vector genome of any one of embodiments 171-179, wherein the 5′ ITR is an AAV2 ITR.
[0392] 181. The AAV vector genome of any one of embodiments 171-180, wherein the 5′ ITR is 130 nucleotides in length.
[0393] 182. The AAV vector genome of any one of embodiments 171-181, wherein the 3′ ITR is an AAV2 ITR.
[0394] 183. The AAV vector genome of any one of embodiments 171-182, wherein the 3′ ITR is 130 nucleotides in length.
[0395] 184. The AAV vector genome of any one of embodiments 171-183, wherein the AAV vector genome comprises one or more of (e.g. all of) the following components: a promoter region, a Kozak region, an NPC protein region, or a polyadenylation (polyA) region.
[0396] 185. The AAV vector genome of any one of embodiments 171-184, comprising an ITR to ITR sequence of SEQ ID NO: 1752, SEQ ID NO: 1753, SEQ ID NO: 1754, SEQ ID NO: 1755, or SEQ ID NO: 1756, SEQ ID NO: 1757, SEQ ID NO: 1758, or SEQ ID NO: 1759.
[0397] 186. An AAV particle comprising the AAV vector genome of any one of embodiments 171-185 and a capsid.
[0398] 187. The AAV particle of embodiment 186, wherein the capsid comprises an amino acid sequence which comprises or which is encoded by a sequence selected from SEQ ID NOs: 1-1261.
[0399] 188. A pharmaceutical composition comprising the AAV particle of any one of embodiments 186-187.
[0400] 189. A method of treating a lysosomal storage disorder, said method comprising administering to a subject the pharmaceutical composition of embodiment 188.
[0401] 190. The method of embodiment 189, wherein the lysosomal storage disorder is NPC1 disease or related disorder.
[0402] 191. The method of embodiment 189 or 190, wherein the lysosomal storage disorder is a disorder associated with decreased NPC protein levels.
[0403] 192. The method of any one of embodiments 189-191, wherein the administration of the pharmaceutical composition results in a 0.5×-3.0× increase in NPC protein expression in a target cell of the subject, as compared to NPC protein expression in an equivalent target cell in a subject without a disorder associated with decreased NPC protein levels.
[0404] 193. The method of any one of embodiments 189-192, further comprising administering miglustat to the subject.

[0405] The details of various aspects or embodiments of the present disclosure are set forth below. Other features, objects, and advantages of the disclosure will be apparent from the description and the claims. In the description, the singular forms also include the plural unless the context clearly dictates otherwise. Unless defined otherwise, all technical and scientific terms used herein have the same meaning as commonly understood by one of ordinary skill in the art in the field of this disclosure. In the case of conflict, the present description will control.

### BRIEF DESCRIPTION OF THE DRAWINGS

[0406] The patent or application file contains at least one drawing executed in color. Copies of this patent or patent application publication with color drawing(s) will be provided by the Office upon request and payment of the necessary fee.

[0407] FIG. 1 depicts the fold over reference expression of NPC1 in HEK293 cells upon transfection with the indicated viral genome construct encoding an NPC1 protein on the X-axis, which are from left to right: no transfection control, reference construct control (ITR_ITR 2; SEQ ID NO: 1753), ITR_ITR 1 (SEQ ID NO: 1752), ITR_ITR 3 (SEQ ID NO: 1754), ITR_ITR 6 (SEQ ID NO: 1757), ITR_ITR 4 (SEQ ID NO: 1755), ITR_ITR 45, ITR_ITR 5, ITR_ITR 43 (SEQ ID NO: 1835), and ITR_ITR 44 (SEQ ID NO: 1836).

[0408] FIG. 2 depicts NPC1 expression normalized to GAPDH and transfection efficiency for the indicated ITR to ITR constructs encoding NPC1 on the X-axis comprising EF-1a promoter variants on the X-axis, which are from left to right: the reference construct control (ITR_ITR 2; SEQ ID NO: 1753), ITR_ITR 27 (promoter variant 11), ITR_ITR 28 (promoter variant 13), ITR_ITR 30 (promoter variant 15), ITR_ITR 31 (promoter variant 18), and a no transfection control.

[0409] FIG. 3 depicts NPC1 expression normalized to GAPDH and transfection efficiency for the ITR to ITR constructs comprising EF-1a promoter variants, promoter variant 8 (SEQ ID NO: 1782), promoter variant 11 (SEQ ID NO: 1785) or promoter 13 (SEQ ID NO: 1787) operably linked to the wild-type nucleotide sequence encoding NPC1 (wtNPC1) or codon-optimized NPC1 coding sequence 2 (SEQ ID NO: 1750), with an intron (SEQ ID NO: 1780) (“+intron”) or without an intron (“−intron”).

[0410] FIG. 4 depicts the percent NPC1 expression relative to healthy patients in patient fibroblasts transfected with the ITR to ITR constructs encoding NPC1 as indicated on the X-axis, which are from left to right: the healthy control, the patient control, ITR_ITR 2 (reference, SEQ ID NO: 1753), ITR_ITR 1 (SEQ ID NO: 1752), ITR_ITR 3 (SEQ ID NO: 1754), ITR_ITR 4 (SEQ ID NO: 1755), or ITR_ITR 5 (SEQ ID NO: 1756).

[0411] FIG. 5 depicts in the leftmost graph, the NPC1 fold expression over treatment in hepatocytes transduced with the ITR to ITR constructs encoding NPC1 as indicated on the X-axis, which are from left to right: no treatment, ITR_ITR 2 (reference, SEQ ID NO: 1753), ITR_ITR 1 (SEQ ID NO: 1752), ITR_ITR 3 (SEQ ID NO: 1754), ITR_ITR 4 (SEQ ID NO: 1755), or ITR_ITR 5 (SEQ ID NO: 1756). FIG. 5 depicts in the rightmost graph, the NPC1 fold expression over treatment in a human neuronal line transfected with the ITR to ITR constructs encoding NPC1 as indicated on the X-axis, which are from left to right: no treatment, ITR_ITR 2 (reference, SEQ ID NO: 1753), ITR_ITR 1 (SEQ ID NO: 1752), ITR_ITR 3 (SEQ ID NO: 1754), ITR_ITR 4 (SEQ ID NO: 1755), ITR_ITR 5 (SEQ ID NO: 1756), ITR_ITR 6 (SEQ ID NO: 1757), or ITR_ITR 7 (SEQ ID NO: 1758).

[0412] FIG. 6 depicts the cholesterol levels (ug/mL) in healthy fibroblasts, NPC1 patient fibroblasts, and NPC1 patient fibroblasts following transduction with the ITR_ITR 2 construct (SEQ ID NO: 1753) encoding an NPC1 protein at increasing MOI as indicated on the X-axis (1e6, 1e5, 1e4, or 1e3).

[0413] FIG. 7 depicts the cholesterol levels (ug/mL) in healthy fibroblasts, NPC1 patient fibroblasts, and NPC1 patient fibroblasts following transduction with the ITR_ITR 3 construct (SEQ ID NO: 1754) (left portion of graph), ITR_ITR 4 construct (SEQ ID NO: 1755) (center portion of the graph), or ITR_ITR 6 construct (SEQ ID NO: 1757) as the doses indicated on the X-axis (1e5, 1e4, or 1e3).

[0414] FIG. 8 depicts the cholesterol levels (relative to a BCA control) in healthy fibroblasts, NPC1 patient fibroblasts, and NPC1 patient fibroblasts following transduction with constructs ITR_ITR 9, ITR_ITR 10, ITR_ITR 11, or ITR_ITR 12 (SEQ ID NOs: 1799-1802, respectively).

[0415] FIG. 9A depicts performance by age of NPC1^{-/-} mice compared to wild-type mice in beam walk test (null n=7, wild-type n=8). Mice were tested for how long it took for them to cross a narrow beam (top panel) and how many times they slipped while walking across (bottom panel). FIG. 9B depicts performance by age of NPC1^{-/-} mice compared to wild-type mice in rotarod test (null n=7, wild-type n=8). Mice were tested for how long they could walk on an accelerating rotating rod before falling for up to 180 seconds.

[0416] FIGS. 10A-10B depict NPC1 expression (NPC1/B-actin) in human neurons (FIG. 10A) and patient fibroblasts (FIG. 10B), transduced with the ITR to ITR constructs encoding NPC1 as indicated on the X-axis, which are from left to right: untreated, ITR_ITR 2 (reference, SEQ ID NO: 1753), ITR_ITR 9, ITR_ITR 10, ITR_ITR 11, or ITR_ITR 12 (SEQ ID NOs: 1799-1802, respectively). Promoter A is Promoter Variant 11 (SEQ ID NO: 1785) and Promoter B is a short CMV promoter (SEQ ID NO: 1736).

[0417] FIGS. 11A-11E depict human NPC1 relative to mouse NPC1 expression in the cortex (FIG. 11A), hippocampus (FIG. 11B), cerebellum (FIG. 11C), brainstem (FIG. 11D), and liver (FIG. 11E) in mice post-IV injection of the constructs ITR_ITR 2 (reference, SEQ ID NO: 1753), ITR_ITR 9, ITR_ITR 10, ITR_ITR 11, or ITR_ITR 12 (SEQ ID NOs: 1799-1802, respectively) in an AAV9 vector at a dose of 1e14 Vg/kg.

### DETAILED DESCRIPTION

### Overview

[0418] Described herein, inter alia, are compositions comprising isolated, e.g., recombinant, viral particles, e.g., AAV particles, for delivery, e.g., vectorized delivery, of a protein, e.g., an NPC protein, e.g., an NPC1 protein, and methods of making and using the same. Adeno-associated viruses (AAV) are small non-enveloped icosahedral capsid viruses of the Parvoviridae family characterized by a single stranded DNA viral genome. Parvoviridae family viruses consist of two subfamilies: Parvovirinae, which infect vertebrates, and Densovirinae, which infect invertebrates. The Parvoviridae family includes the Dependovirus genus which includes AAV, capable of replication in vertebrate hosts including, but not limited to, human, primate, bovine, canine, equine, and ovine species.

[0419] The parvoviruses and other members of the Parvoviridae family are generally described in Kenneth I. Berns, “Parvoviridae: The Viruses and Their Replication,” Chapter 69 in Fields Virology (3d Ed. 1996), the contents of which are incorporated by reference in their entirety as related to parvoviruses.

[0420] AAV have proven to be useful as a biological tool due to their relatively simple structure, their ability to infect a wide range of cells (including quiescent and dividing cells) without integration into the host genome and without replicating, and their relatively benign immunogenic profile. The genome of the virus may be manipulated to contain a minimum of components for the assembly of a functional recombinant virus, or viral particle, which is loaded with or engineered to target a particular tissue and express or deliver a desired payload. The genome of the virus may be modified to contain a minimum of components for the assembly of a functional recombinant virus, or viral particle, which is loaded with or engineered to express or deliver a desired nucleic acid construct or payload, e.g., a transgene, polypeptide-encoding polynucleotide, e.g., NPC1 and/or NPC2, which may be delivered to a target cell, tissue, or organism. In some embodiments, the target cell is a CNS cell. In some embodiments, the target tissue is a CNS tissue. The target CNS tissue may be brain tissue. In some embodiments, the brain target tissues comprise a caudate-putamen, thalamus, superior colliculus, cortex, brain stem, corpus collosum, or combination thereof.

[0421] Gene therapy presents an alternative treatment approach for NPC1 and related diseases. AAV vectors and particles are commonly used in gene therapy approaches as a result of a number of advantageous features. Without wishing to be bound by theory, it is believed in some embodiments, that expression vectors, e.g., an adeno-associated viral vector (AAVs) or AAV particle, e.g., an AAV particle described herein, can be used to administer and/or deliver NPC1 and/or NPC2 and related proteins, in order to achieve sustained, high concentrations, allowing for longer lasting efficacy, fewer dose treatments, and/or more consistent levels of the NPC1 and/or NPC2 protein, relative to a non-AAV therapy.

[0422] As demonstrated in the Examples herein below, the compositions and methods described herein provides improved features compared to prior enzyme replacement approaches, including increased NPC1 expression and biodistribution. In some embodiments, an AAV viral genome encoding an NPC1 protein described herein which comprise an optimized nucleotide sequence encoding the NPC1 protein (e.g., SEQ ID NO: 1750 or 1749) result in high biodistribution in the CNS and increased NPC1 expression. The compositions and methods described herein can be used in the treatment of disorders associated with a lack of an NPC1 protein, such as a lysosomal storage disease or Niemann-Pick disease type C1.

### I. Compositions

### Adeno-Associated Viral (AAV) Vectors

[0423] AAV have a genome of about 5,000 nucleotides in length which contains two open reading frames encoding the proteins responsible for replication (Rep) and the structural protein of the capsid (Cap). In some embodiments, the open reading frames are flanked by two Inverted Terminal Repeat (ITR) sequences, which serve as the origin of replication of the viral genome. The wild-type AAV viral genome comprises nucleotide sequences for two open reading frames, one for the four non-structural Rep proteins (Rep78, Rep68, Rep52, Rep40, encoded by Rep genes) and one for the three capsid, or structural, proteins (VP1, VP2, VP3, encoded by capsid genes or Cap genes). The Rep proteins are used for replication and packaging, while the capsid proteins are assembled to create the protein shell of the AAV, or AAV capsid. Alternative splicing and alternate initiation codons and promoters result in the generation of four different Rep proteins from a single open reading frame and the generation of three capsid proteins from a single open reading frame. Though it varies by AAV serotype, as a non-limiting example, for AAV9/hu.14 (SEQ ID NO: 123 of U.S. Pat. No. 7,906,111, the contents of which are herein incorporated by reference in their entirety) VP1 refers to amino acids 1-736, VP2 refers to amino acids 138-736, and VP3 refers to amino acids 203-736. In other words, VP1 is the full-length capsid sequence, while VP2 and VP3 are shorter components of the whole. As a result, changes in the sequence in the VP3 region, are also changes to VP1 and VP2, however, the percent difference as compared to the parent sequence will be greatest for VP3 since it is the shortest sequence of the three. Though described here in relation to the amino acid sequence, the nucleic acid sequence encoding these proteins can be similarly described. Together, the three capsid proteins assemble to create the AAV capsid protein. While not wishing to be bound by theory, the AAV capsid protein typically comprises a molar ratio of 1:1:10 of VP1:VP2:VP3. As used herein, an “AAV serotype” is defined primarily by the AAV capsid. In some instances, the ITRs are also specifically described by the AAV serotype (e.g., AAV2/9).

[0424] The AAV vector typically requires a co-helper (e.g., adenovirus) to undergo productive infection in cells. In the absence of such helper functions, the AAV virions essentially enter host cells but do not integrate into the cells' genome.

[0425] AAV vectors have been investigated for delivery of gene therapeutics because of several unique features. Non-limiting examples of the features include (i) the ability to infect both dividing and non-dividing cells; (ii) a broad host range for infectivity, including human cells; (iii) wild-type AAV has not been associated with any disease and has not been shown to replicate in infected cells; (iv) the lack of cell-mediated immune response against the vector, and (v) the non-integrative nature in a host chromosome thereby reducing potential for long-term genetic alterations. Moreover, infection with AAV vectors has minimal influence on changing the pattern of cellular gene expression (Stilwell and Samulski et al., Biotechniques, 2003, 34, 148, the contents of which are herein incorporated by reference in their entirety).

[0426] Typically, AAV vectors for NPC protein delivery may be recombinant viral vectors which are replication defective as they lack sequences encoding functional Rep and Cap proteins within the viral genome. In some cases, the defective AAV vectors may lack most or all coding sequences and essentially only contain one or two AAV ITR sequences and a payload sequence. In certain embodiments, the viral genome encodes NPC protein. For example, the viral genome encodes human NPC protein(s).

[0427] In some embodiments, the AAV particles of the present disclosure may be introduced into mammalian cells.

[0428] AAV vectors may be modified to enhance the efficiency of delivery. Such modified AAV vectors of the present disclosure can be packaged efficiently and can be used to successfully infect the target cells at high frequency and with minimal toxicity.

[0429] In other embodiments, AAV particles of the present disclosure may be used to deliver NPC protein to the central nervous system (see, e.g., U.S. Pat. No. 6,180,613; the contents of which are herein incorporated by reference in their entirety) or to specific tissues of the CNS.

[0430] As used herein, the term “AAV vector” or “AAV particle” comprises a capsid and a viral genome comprising a polynucleotide payload. As used herein, “payload” or “payload region” refers to one or more polynucleotides or polynucleotide regions encoded by or within a viral genome or an expression product of such polynucleotide or polynucleotide region, e.g., a transgene, a polynucleotide encoding a polypeptide or multi-polypeptide, e.g., NPC protein.

[0431] It is understood that the compositions described herein may have additional conservative or non-essential amino acid substitutions, which do not have a substantial effect on their functions.

### AAV Serotypes

[0432] AAV particles of the present disclosure may comprise or be derived from any natural or recombinant AAV serotype. According to the present disclosure, the AAV particles may utilize or be based on a serotype or include a peptide selected from any of the following VOY101, VOY201, AAVPHP.B (PHP.B), AAVPHP.A (PHP.A), AAVG2B-26, AAVG2B-13, AAVTH1.1-32, AAVTH1.1-35, AAVPHP.B2 (PHP.B2), AAVPHP.B3 (PHP.B3), AAVPHP.N/PHP.B-DGT, AAVPHP.B-EST, AAVPHP.B-GGT, AAVPHP.B-ATP, AAVPHP.B-ATT-T, AAVPHP.B-DGT-T, AAVPHP.B-GGT-T, AAVPHP.B-SGS, AAVPHP.B-AQP, AAVPHP.B-QQP, AAVPHP.B-SNP(3), AAVPHP.B-SNP, AAVPHP.B-QGT, AAVPHP.B-NQT, AAVPHP.B-EGS, AAVPHP.B-SGN, AAVPHP.B-EGT, AAVPHP.B-DST, AAVPHP.B-DST, AAVPHP.B-STP, AAVPHP.B-PQP, AAVPHP.B-SQP, AAVPHP.B-QLP, AAVPHP.B-TMP, AAVPHP.B-TTP, AAVPHP.S/G2A12, AAVG2A15/G2A3 (G2A3), AAVG2B4 (G2B4), AAVG2B5 (G2B5), PHP.S, AAV1, AAV2, AAV2G9, AAV3, AAV3a, AAV3b, AAV3-3, AAV4, AAV4-4, AAV5, AAV6, AAV6.1, AAV6.2, AAV6.1.2, AAV7, AAV7.2, AAV8, AAV9, AAV9.11, AAV9.13, AAV9.16, AAV9.24, AAV9.45, AAV9.47, AAV9.61, AAV9.68, AAV9.84, AAV9.9, AAV10, AAV11, AAV12, AAV16.3, AAV24.1, AAV27.3, AAV42.12, AAV42-1b, AAV42-2, AAV42-3a, AAV42-3b, AAV42-4, AAV42-5a, AAV42-5b, AAV42-6b, AAV42-8, AAV42-10, AAV42-11, AAV42-12, AAV42-13, AAV42-15, AAV42-aa, AAV43-1, AAV43-12, AAV43-20, AAV43-21, AAV43-23, AAV43-25, AAV43-5, AAV44.1, AAV44.2, AAV44.5, AAV223.1, AAV223.2, AAV223.4, AAV223.5, AAV223.6, AAV223.7, AAV1-7/rh.48, AAV1-8/rh.49, AAV2-15/rh.62, AAV2-3/rh.61, AAV2-4/rh.50, AAV2-5/rh.51, AAV3.1/hu.6, AAV3.1/hu.9, AAV3-9/rh.52, AAV3-11/rh.53, AAV4-8/r11.64, AAV4-9/rh.54, AAV4-19/rh.55, AAV5-3/rh.57, AAV5-22/rh.58, AAV7.3/hu.7, AAV16.8/hu.10, AAV16.12/hu.11, AAV29.3/bb.1, AAV29.5/bb.2, AAV106.1/hu.37, AAV114.3/hu.40, AAV127.2/hu.41, AAV127.5/hu.42, AAV128.3/hu.44, AAV130.4/hu.48, AAV145.1/hu.53, AAV145.5/hu.54, AAV145.6/hu.55, AAV161.10/hu.60, AAV161.6/hu.61, AAV33.12/hu.17, AAV33.4/hu.15, AAV33.8/hu.16, AAV52/hu.19, AAV52.1/hu.20, AAV58.2/hu.25, AAVA3.3, AAVA3.4, AAVA3.5, AAVA3.7, AAVC1, AAVC2, AAVC5, AAV-DJ, AAV-DJ8, AAVF3, AAVF5, AAVH2, AAVrh.72, AAVhu.8, AAVrh.68, AAVrh.70, AAVpi.1, AAVpi.3, AAVpi.2, AAVrh.60, AAVrh.44, AAVrh.65, AAVrh.55, AAVrh.47, AAVrh.69, AAVrh.45, AAVrh.59, AAVhu.12, AAVH6, AAVLK03, AAVH-1/hu.1, AAVH-5/hu.3, AAVLG-10/rh.40, AAVLG-4/rh.38, AAVLG-9/hu.39, AAVN721-8/rh.43, AAVCh.5, AAVCh.5R1, AAVcy.2, AAVcy.3, AAVcy.4, AAVcy.5, AAVCy.5R1, AAVCy.5R2, AAVCy.5R3, AAVCy.5R4, AAVcy.6, AAVhu.1, AAVhu.2, AAVhu.3, AAVhu.4, AAVhu.5, AAVhu.6, AAVhu.7, AAVhu.9, AAVhu.10, AAVhu.11, AAVhu.13, AAVhu.15, AAVhu.16, AAVhu.17, AAVhu.18, AAVhu.20, AAVhu.21, AAVhu.22, AAVhu.23.2, AAVhu.24, AAVhu.25, AAVhu.27, AAVhu.28, AAVhu.29, AAVhu.29R, AAVhu.31, AAVhu.32, AAVhu.34, AAVhu.35, AAVhu.37, AAVhu.39, AAVhu.40, AAVhu.41, AAVhu.42, AAVhu.43, AAVhu.44, AAVhu.44R1, AAVhu.44R2, AAVhu.44R3, AAVhu.45, AAVhu.46, AAVhu.47, AAVhu.48, AAVhu.48R1, AAVhu.48R2, AAVhu.48R3, AAVhu.49, AAVhu.51, AAVhu.52, AAVhu.54, AAVhu.55, AAVhu.56, AAVhu.57, AAVhu.58, AAVhu.60, AAVhu.61, AAVhu.63, AAVhu.64, AAVhu.66, AAVhu.67, AAVhu.14/9, AAVhu.t 19, AAVrh.2, AAVrh.2R, AAVrh.8, AAVrh.8R, AAVrh.10, AAVrh.12, AAVrh.13, AAVrh.13R, AAVrh.14, AAVrh.17, AAVrh.18, AAVrh.19, AAVrh.20, AAVrh.21, AAVrh.22, AAVrh.23, AAVrh.24, AAVrh.25, AAVrh.31, AAVrh.32, AAVrh.33, AAVrh.34, AAVrh.35, AAVrh.36, AAVrh.37, AAVrh.37R2, AAVrh.38, AAVrh.39, AAVrh.40, AAVrh.46, AAVrh.48, AAVrh.48.1, AAVrh.48.1.2, AAVrh.48.2, AAVrh.49, AAVrh.51, AAVrh.52, AAVrh.53, AAVrh.54, AAVrh.56, AAVrh.57, AAVrh.58, AAVrh.61, AAVrh.64, AAVrh.64R1, AAVrh.64R2, AAVrh.67, AAVrh.73, AAVrh.74, AAVrh8R, AAVrh8R A586R mutant, AAVrh8R R533A mutant, AAAV, BAAV, caprine AAV, bovine AAV, AAVhE1.1, AAVhEr1.5, AAVhER1.14, AAVhEr1.8, AAVhEr1.16, AAVhEr1.18, AAVhEr1.35, AAVhEr1.7, AAVhEr1.36, AAVhEr2.29, AAVhEr2.4, AAVhEr2.16, AAVhEr2.30, AAVhEr2.31, AAVhEr2.36, AAVhER1.23, AAVhEr3.1, AAV2.5T, AAV-PAEC, AAV-LKO1, AAV-LK02, AAV-LK03, AAV-LK04, AAV-LK05, AAV-LK06, AAV-LK07, AAV-LK08, AAV-LK09, AAV-LK10, AAV-LK11, AAV-LK12, AAV-LK13, AAV-LK14, AAV-LK15, AAV-LK16, AAV-LK17, AAV-LK18, AAV-LK19, AAV-PAEC2, AAV-PAEC4, AAV-PAEC6, AAV-PAEC7, AAV-PAEC8, AAV-PAEC11, AAV-PAEC12, AAV-2-pre-miRNA-101, AAV-8h, AAV-8b, AAV-h, AAV-b, AAV SM 10-2, AAV Shuffle 100-1, AAV Shuffle 100-3, AAV Shuffle 100-7, AAV Shuffle 10-2, AAV Shuffle 10-6, AAV Shuffle 10-8, AAV Shuffle 100-2, AAV SM 10-1, AAV SM 10-8, AAV SM 100-3, AAV SM 100-10, BNP61 AAV, BNP62 AAV, BNP63 AAV, AAVrh.50, AAVrh.43, AAVrh.62, AAVrh.48, AAVhu.19, AAVhu.11, AAVhu.53, AAV4-8/rh.64, AAVLG-9/hu.39, AAV54.5/hu.23, AAV54.2/hu.22, AAV54.7/hu.24, AAV54.1/hu.21, AAV54.4R/hu.27, AAV46.2/hu.28, AAV46.6/hu.29, AAV128.1/hu.43, true type AAV (ttAAV), UPENN AAV 10, Japanese AAV 10 serotypes, AAV CBr-7.1, AAV CBr-7.10, AAV CBr-7.2, AAV CBr-7.3, AAV CBr-7.4, AAV CBr-7.5, AAV CBr-7.7, AAV CBr-7.8, AAV CBr-B7.3, AAV CBr-B7.4, AAV CBr-E1, AAV CBr-E2, AAV CBr-E3, AAV CBr-E4, AAV CBr-E5, AAV CBr-e5, AAV CBr-E6, AAV CBr-E7, AAV CBr-E8, AAV CHt-1, AAV CHt-2, AAV CHt-3, AAV CHt-6.1, AAV CHt-6.10, AAV CHt-6.5, AAV CHt-6.6, AAV CHt-6.7, AAV CHt-6.8, AAV CHt-P1, AAV CHt-P2, AAV CHt-P5, AAV CHt-P6, AAV CHt-P8, AAV CHt-P9, AAV CKd-1, AAV CKd-10, AAV CKd-2, AAV CKd-3, AAV CKd-4, AAV CKd-6, AAV CKd-7, AAV CKd-8, AAV CKd-B1, AAV CKd-B2, AAV CKd-B3, AAV CKd-B4, AAV CKd-B5, AAV CKd-B6, AAV CKd-B7, AAV CKd-B8, AAV CKd-H1, AAV CKd-H2, AAV CKd-H3, AAV CKd-H4, AAV CKd-H5, AAV CKd-H6, AAV CKd-N3, AAV CKd-N4, AAV CKd-N9, AAV CLg-F1, AAV CLg-F2, AAV CLg-F3, AAV CLg-F4, AAV CLg-F5, AAV CLg-F6, AAV CLg-F7, AAV CLg-F8, AAV CLv-1, AAV CLv1-1, AAV Clv1-10, AAV CLv1-2, AAV CLv-12, AAV CLv1-3, AAV CLv-13, AAV CLv1-4, AAV Clv1-7, AAV Clv1-8, AAV Clv1-9, AAV CLv-2, AAV CLv-3, AAV CLv-4, AAV CLv-6, AAV CLv-8, AAV CLv-D1, AAV CLv-D2, AAV CLv-D3, AAV CLv-D4, AAV CLv-D5, AAV CLv-D6, AAV CLv-D7, AAV CLv-D8, AAV CLv-E1, AAV CLv-K1, AAV CLv-K3, AAV CLv-K6, AAV CLv-L4, AAV CLv-L5, AAV CLv-L6, AAV CLv-M1, AAV CLv-M11, AAV CLv-M2, AAV CLv-M5, AAV CLv-M6, AAV CLv-M7, AAV CLv-M8, AAV CLv-M9, AAV CLv-R1, AAV CLv-R2, AAV CLv-R3, AAV CLv-R4, AAV CLv-R5, AAV CLv-R6, AAV CLv-R7, AAV CLv-R8, AAV CLv-R9, AAV CSp-1, AAV CSp-10, AAV CSp-11, AAV CSp-2, AAV CSp-3, AAV CSp-4, AAV CSp-6, AAV CSp-7, AAV CSp-8, AAV CSp-8.10, AAV CSp-8.2, AAV CSp-8.4, AAV CSp-8.5, AAV CSp-8.6, AAV CSp-8.7, AAV CSp-8.8, AAV CSp-8.9, AAV CSp-9, AAV.hu.48R3, AAV.VR-355, AAV3B, AAV4, AAV5, AAVF1/HSC1, AAVF11/HSC11, AAVF12/HSC12, AAVF13/HSC13, AAVF14/HSC14, AAVF15/HSC15, AAVF16/HSC16, AAVF17/HSC17, AAVF2/HSC2, AAVF3/HSC3, AAVF4/HSC4, AAVF5/HSC5, AAVF6/HSC6, AAVF7/HSC7, AAVF8/HSC8, and/or AAVF9/HSC9 and variants thereof.

[0433] In some embodiments, the AAV serotype may be, or have, a sequence as described in United States Publication No. US20030138772, the contents of which are herein incorporated by reference in their entirety, such as, but not limited to, AAV1 (SEQ ID NO: 6 and 64 of US20030138772), AAV2 (SEQ ID NO: 7 and 70 of US20030138772), AAV3 (SEQ ID NO: 8 and 71 of US20030138772), AAV4 (SEQ ID NO: 63 of US20030138772), AAV5 (SEQ ID NO: 114 of US20030138772), AAV6 (SEQ ID NO: 65 of US20030138772), AAV7 (SEQ ID NO: 1-3 of US20030138772), AAV8 (SEQ ID NO: 4 and 95 of US20030138772), AAV9 (SEQ ID NO: 5 and 100 of US20030138772), AAV10 (SEQ ID NO: 117 of US20030138772), AAV11 (SEQ ID NO: 118 of US20030138772), AAV12 (SEQ ID NO: 119 of US20030138772), AAVrh10 (amino acids 1 to 738 of SEQ ID NO: 81 of US20030138772), AAV16.3 (US20030138772 SEQ ID NO: 10), AAV29.3/bb.1 (US20030138772 SEQ ID NO: 11), AAV29.4 (US20030138772 SEQ ID NO: 12), AAV29.5/bb.2 (US20030138772 SEQ ID NO: 13), AAV1.3 (US20030138772 SEQ ID NO: 14), AAV13.3 (US20030138772 SEQ ID NO: 15), AAV24.1 (US20030138772 SEQ ID NO: 16), AAV27.3 (US20030138772 SEQ ID NO: 17), AAV7.2 (US20030138772 SEQ ID NO: 18), AAVC1 (US20030138772 SEQ ID NO: 19), AAVC3 (US20030138772 SEQ ID NO: 20), AAVC5 (US20030138772 SEQ ID NO: 21), AAVF1 (US20030138772 SEQ ID NO: 22), AAVF3 (US20030138772 SEQ ID NO: 23), AAVF5 (US20030138772 SEQ ID NO: 24), AAVH6 (US20030138772 SEQ ID NO: 25), AAVH2 (US20030138772 SEQ ID NO: 26), AAV42-8 (US20030138772 SEQ ID NO: 27), AAV42-15 (US20030138772 SEQ ID NO: 28), AAV42-5b (US20030138772 SEQ ID NO: 29), AAV42-1b (US20030138772 SEQ ID NO: 30), AAV42-13 (US20030138772 SEQ ID NO: 31), AAV42-3a (US20030138772 SEQ ID NO: 32), AAV42-4 (US20030138772 SEQ ID NO: 33), AAV42-5a (US20030138772 SEQ ID NO: 34), AAV42-10 (US20030138772 SEQ ID NO: 35), AAV42-3b (US20030138772 SEQ ID NO: 36), AAV42-11 (US20030138772 SEQ ID NO: 37), AAV42-6b (US20030138772 SEQ ID NO: 38), AAV43-1 (US20030138772 SEQ ID NO: 39), AAV43-5 (US20030138772 SEQ ID NO: 40), AAV43-12 (US20030138772 SEQ ID NO: 41), AAV43-20 (US20030138772 SEQ ID NO: 42), AAV43-21 (US20030138772 SEQ ID NO: 43), AAV43-23 (US20030138772 SEQ ID NO: 44), AAV43-25 (US20030138772 SEQ ID NO: 45), AAV44.1 (US20030138772 SEQ ID NO: 46), AAV44.5 (US20030138772 SEQ ID NO: 47), AAV223.1 (US20030138772 SEQ ID NO: 48), AAV223.2 (US20030138772 SEQ ID NO: 49), AAV223.4 (US20030138772 SEQ ID NO: 50), AAV223.5 (US20030138772 SEQ ID NO: 51), AAV223.6 (US20030138772 SEQ ID NO: 52), AAV223.7 (US20030138772 SEQ ID NO: 53), AAVA3.4 (US20030138772 SEQ ID NO: 54), AAVA3.5 (US20030138772 SEQ ID NO: 55), AAVA3.7 (US20030138772 SEQ ID NO: 56), AAVA3.3 (US20030138772 SEQ ID NO: 57), AAV42.12 (US20030138772 SEQ ID NO: 58), AAV44.2 (US20030138772 SEQ ID NO: 59), AAV42-2 (US20030138772 SEQ ID NO: 9), or variants thereof.

[0434] In some embodiments, the AAV serotype may be, or have, a sequence as described in United States Publication No. US20150159173, the contents of which are herein incorporated by reference in their entirety, such as, but not limited to, AAV2 (SEQ ID NO: 7 and 23 of US20150159173), rh20 (SEQ ID NO: 1 of US20150159173), rh32/33 (SEQ ID NO: 2 of US20150159173), rh39 (SEQ ID NO: 3, 20 and 36 of US20150159173), rh46 (SEQ ID NO: 4 and 22 of US20150159173), rh73 (SEQ ID NO: 5 of US20150159173), rh74 (SEQ ID NO: 6 of US20150159173), AAV6.1 (SEQ ID NO: 29 of US20150159173), rh.8 (SEQ ID NO: 41 of US20150159173), rh.48.1 (SEQ ID NO: 44 of US20150159173), hu.44 (SEQ ID NO: 45 of US20150159173), hu.29 (SEQ ID NO: 42 of US20150159173), hu.48 (SEQ ID NO: 38 of US20150159173), rh54 (SEQ ID NO: 49 of US20150159173), AAV2 (SEQ ID NO: 7 of US20150159173), cy.5 (SEQ ID NO: 8 and 24 of US20150159173), rh.10 (SEQ ID NO: 9 and 25 of US20150159173), rh.13 (SEQ ID NO: 10 and 26 of US20150159173), AAV1 (SEQ ID NO: 11 and 27 of US20150159173), AAV3 (SEQ ID NO: 12 and 28 of US20150159173), AAV6 (SEQ ID NO: 13 and 29 of US20150159173), AAV7 (SEQ ID NO: 14 and 30 of US20150159173), AAV8 (SEQ ID NO: 15 and 31 of US20150159173), hu.13 (SEQ ID NO: 16 and 32 of US20150159173), hu.26 (SEQ ID NO: 17 and 33 of US20150159173), hu.37 (SEQ ID NO: 18 and 34 of US20150159173), hu.53 (SEQ ID NO: 19 and 35 of US20150159173), rh.43 (SEQ ID NO: 21 and 37 of US20150159173), rh2 (SEQ ID NO: 39 of US20150159173), rh.37 (SEQ ID NO: 40 of US20150159173), rh.64 (SEQ ID NO: 43 of US20150159173), rh.48 (SEQ ID NO: 44 of US20150159173), ch.5 (SEQ ID NO 46 of US20150159173), rh.67 (SEQ ID NO: 47 of US20150159173), rh.58 (SEQ ID NO: 48 of US20150159173), or variants thereof including, but not limited to Cy5R1, Cy5R2, Cy5R3, Cy5R4, rh.13R, rh.37R2, rh.2R, rh.8R, rh.48.1, rh.48.2, rh.48.1.2, hu.44R1, hu.44R2, hu.44R3, hu.29R, ch.5R1, rh64R1, rh64R2, AAV6.2, AAV6.1, AAV6.12, hu.48R1, hu.48R2, and hu.48R3.

[0435] In some embodiments, the AAV serotype may be, or have, a sequence as described in U.S. Pat. No. 7,198,951, the contents of which are herein incorporated by reference in their entirety, such as, but not limited to, AAV9 (SEQ ID NO: 1-3 of U.S. Pat. No. 7,198,951), AAV2 (SEQ ID NO: 4 of U.S. Pat. No. 7,198,951), AAV1 (SEQ ID NO: 5 of U.S. Pat. No. 7,198,951), AAV3 (SEQ ID NO: 6 of U.S. Pat. No. 7,198,951), and AAV8 (SEQ ID NO: 7 of U.S. Pat. No. 7,198,951).

[0436] In some embodiments, the AAV serotype may be, or have, a mutation in the AAV9 sequence as described by N Pulicherla et al. (Molecular Therapy 19(6):1070-1078 (2011), herein incorporated by reference in its entirety), such as but not limited to, AAV9.9, AAV9.11, AAV9.13, AAV9.16, AAV9.24, AAV9.45, AAV9.47, AAV9.61, AAV9.68, AAV9.84.

[0437] In some embodiments, the AAV serotype may be, or have, a sequence as described in U.S. Pat. No. 6,156,303, the contents of which are herein incorporated by reference in their entirety, such as, but not limited to, AAV3B (SEQ ID NO: 1 and 10 of U.S. Pat. No. 6,156,303), AAV6 (SEQ ID NO: 2, 7 and 11 of U.S. Pat. No. 6,156,303), AAV2 (SEQ ID NO: 3 and 8 of U.S. Pat. No. 6,156,303), AAV3A (SEQ ID NO: 4 and 9, of U.S. Pat. No. 6,156,303), or derivatives thereof.

[0438] In some embodiments, the AAV serotype may be, or have, a sequence as described in United States Publication No. US20140359799, the contents of which are herein incorporated by reference in their entirety, such as, but not limited to, AAV8 (SEQ ID NO: 1 of US20140359799), AAVDJ (SEQ ID NO: 2 and 3 of US20140359799), or variants thereof.

[0439] In some embodiments, the serotype may be AAVDJ or a variant thereof, such as AAVDJ8 (or AAV-DJ8), as described by Grimm et al. (Journal of Virology 82(12): 5887-5911 (2008), herein incorporated by reference in its entirety). The amino acid sequence of AAVDJ8 may comprise two or more mutations in order to remove the heparin binding domain (HBD). As a non-limiting example, the AAV-DJ sequence described as SEQ ID NO: 1 in U.S. Pat. No. 7,588,772, the contents of which are herein incorporated by reference in their entirety, may comprise two mutations: (1) R587Q where arginine (R; Arg) at amino acid 587 is changed to glutamine (Q; Gln) and (2) R590T where arginine (R; Arg) at amino acid 590 is changed to threonine (T; Thr). As another non-limiting example, may comprise three mutations: (1) K406R where lysine (K; Lys) at amino acid 406 is changed to arginine (R; Arg), (2) R587Q where arginine (R; Arg) at amino acid 587 is changed to glutamine (Q; Gln) and (3) R590T where arginine (R; Arg) at amino acid 590 is changed to threonine (T; Thr).

[0440] In some embodiments, the AAV serotype may be, or have, a sequence of AAV4 as described in International Publication No. WO1998011244, the contents of which are herein incorporated by reference in their entirety, such as, but not limited to AAV4 (SEQ ID NO: 1-20 of WO1998011244).

[0441] In some embodiments, the AAV serotype may be, or have, a mutation in the AAV2 sequence to generate AAV2G9 as described in International Publication No. WO2014144229 and herein incorporated by reference in its entirety.

[0442] In some embodiments, the AAV serotype may be, or have, a sequence as described in International Publication No. WO2005033321, the contents of which are herein incorporated by reference in their entirety, such as, but not limited to AAV3-3 (SEQ ID NO: 217 of WO2005033321), AAV1 (SEQ ID NO: 219 and 202 of WO2005033321), AAV106.1/hu.37 (SEQ ID No: 10 of WO2005033321), AAV114.3/hu.40 (SEQ ID No: 11 of WO2005033321), AAV127.2/hu.41 (SEQ ID NO:6 and 8 of WO2005033321), AAV128.3/hu.44 (SEQ ID No: 81 of WO2005033321), AAV130.4/hu.48 (SEQ ID NO: 78 of WO2005033321), AAV145.1/hu.53 (SEQ ID No: 176 and 177 of WO2005033321), AAV145.6/hu.56 (SEQ ID NO: 168 and 192 of WO2005033321), AAV16.12/hu.11 (SEQ ID NO: 153 and 57 of WO2005033321), AAV16.8/hu.10 (SEQ ID NO: 156 and 56 of WO2005033321), AAV161.10/hu.60 (SEQ ID No: 170 of WO2005033321), AAV161.6/hu.61 (SEQ ID No: 174 of WO2005033321), AAV1-7/rh.48 (SEQ ID NO: 32 of WO2005033321), AAV1-8/rh.49 (SEQ ID NOs: 103 and 25 of WO2005033321), AAV2 (SEQ ID NO: 211 and 221 of WO2005033321), AAV2-15/rh.62 (SEQ ID No: 33 and 114 of WO2005033321), AAV2-3/rh.61 (SEQ ID NO: 21 of WO2005033321), AAV2-4/rh.50 (SEQ ID No: 23 and 108 of WO2005033321), AAV2-5/rh.51 (SEQ ID NO: 104 and 22 of WO2005033321), AAV3.1/hu.6 (SEQ ID NO: 5 and 84 of WO2005033321), AAV3.1/hu.9 (SEQ ID NO: 155 and 58 of WO2005033321), AAV3-11/rh.53 (SEQ ID NO: 186 and 176 of WO2005033321), AAV3-3 (SEQ ID NO: 200 of WO2005033321), AAV33.12/hu.17 (SEQ ID NO:4 of WO2005033321), AAV33.4/hu.15 (SEQ ID No: 50 of WO2005033321), AAV33.8/hu.16 (SEQ ID No: 51 of WO2005033321), AAV3-9/rh.52 (SEQ ID NO: 96 and 18 of WO2005033321), AAV4-19/rh.55 (SEQ ID NO: 117 of WO2005033321), AAV4-4 (SEQ ID NO: 201 and 218 of WO2005033321), AAV4-9/rh.54 (SEQ ID NO: 116 of WO2005033321), AAV5 (SEQ ID NO: 199 and 216 of WO2005033321), AAV52.1/hu.20 (SEQ ID NO: 63 of WO2005033321), AAV52/hu.19 (SEQ ID NO: 133 of WO2005033321), AAV5-22/rh.58 (SEQ ID No: 27 of WO2005033321), AAV5-3/rh.57 (SEQ ID NO: 105 of WO2005033321), AAV5-3/rh.57 (SEQ ID No: 26 of WO2005033321), AAV58.2/hu.25 (SEQ ID No: 49 of WO2005033321), AAV6 (SEQ ID NO: 203 and 220 of WO2005033321), AAV7 (SEQ ID NO: 222 and 213 of WO2005033321), AAV7.3/hu.7 (SEQ ID No: 55 of WO2005033321), AAV8 (SEQ ID NO: 223 and 214 of WO2005033321), AAVH-1/hu.1 (SEQ ID No: 46 of WO2005033321), AAVH-5/hu.3 (SEQ ID No: 44 of WO2005033321), AAVhu.1 (SEQ ID NO: 144 of WO2005033321), AAVhu.10 (SEQ ID NO: 156 of WO2005033321), AAVhu.11 (SEQ ID NO: 153 of WO2005033321), AAVhu.12 (WO2005033321 SEQ ID NO: 59), AAVhu.13 (SEQ ID NO: 129 of WO2005033321), AAVhu.14/AAV9 (SEQ ID NO: 123 and 3 of WO2005033321), AAVhu.15 (SEQ ID NO: 147 of WO2005033321), AAVhu.16 (SEQ ID NO: 148 of WO2005033321), AAVhu.17 (SEQ ID NO: 83 of WO2005033321), AAVhu.18 (SEQ ID NO: 149 of WO2005033321), AAVhu.19 (SEQ ID NO: 133 of WO2005033321), AAVhu.2 (SEQ ID NO: 143 of WO2005033321), AAVhu.20 (SEQ ID NO: 134 of WO2005033321), AAVhu.21 (SEQ ID NO: 135 of WO2005033321), AAVhu.22 (SEQ ID NO: 138 of WO2005033321), AAVhu.23.2 (SEQ ID NO: 137 of WO2005033321), AAVhu.24 (SEQ ID NO: 136 of WO2005033321), AAVhu.25 (SEQ ID NO: 146 of WO2005033321), AAVhu.27 (SEQ ID NO: 140 of WO2005033321), AAVhu.29 (SEQ ID NO: 132 of WO2005033321), AAVhu.3 (SEQ ID NO: 145 of WO2005033321), AAVhu.31 (SEQ ID NO: 121 of WO2005033321), AAVhu.32 (SEQ ID NO: 122 of WO2005033321), AAVhu.34 (SEQ ID NO: 125 of WO2005033321), AAVhu.35 (SEQ ID NO: 164 of WO2005033321), AAVhu.37 (SEQ ID NO: 88 of WO2005033321), AAVhu.39 (SEQ ID NO: 102 of WO2005033321), AAVhu.4 (SEQ ID NO: 141 of WO2005033321), AAVhu.40 (SEQ ID NO: 87 of WO2005033321), AAVhu.41 (SEQ ID NO: 91 of WO2005033321), AAVhu.42 (SEQ ID NO: 85 of WO2005033321), AAVhu.43 (SEQ ID NO: 160 of WO2005033321), AAVhu.44 (SEQ ID NO: 144 of WO2005033321), AAVhu.45 (SEQ ID NO: 127 of WO2005033321), AAVhu.46 (SEQ ID NO: 159 of WO2005033321), AAVhu.47 (SEQ ID NO: 128 of WO2005033321), AAVhu.48 (SEQ ID NO: 157 of WO2005033321), AAVhu.49 (SEQ ID NO: 189 of WO2005033321), AAVhu.51 (SEQ ID NO: 190 of WO2005033321), AAVhu.52 (SEQ ID NO: 191 of WO2005033321), AAVhu.53 (SEQ ID NO: 186 of WO2005033321), AAVhu.54 (SEQ ID NO: 188 of WO2005033321), AAVhu.55 (SEQ ID NO: 187 of WO2005033321), AAVhu.56 (SEQ ID NO: 192 of WO2005033321), AAVhu.57 (SEQ ID NO: 193 of WO2005033321), AAVhu.58 (SEQ ID NO: 194 of WO2005033321), AAVhu.6 (SEQ ID NO: 84 of WO2005033321), AAVhu.60 (SEQ ID NO: 184 of WO2005033321), AAVhu.61 (SEQ ID NO: 185 of WO2005033321), AAVhu.63 (SEQ ID NO: 195 of WO2005033321), AAVhu.64 (SEQ ID NO: 196 of WO2005033321), AAVhu.66 (SEQ ID NO: 197 of WO2005033321), AAVhu.67 (SEQ ID NO: 198 of WO2005033321), AAVhu.7 (SEQ ID NO: 150 of WO2005033321), AAVhu.8 (WO2005033321 SEQ ID NO: 12), AAVhu.9 (SEQ ID NO: 155 of WO2005033321), AAVLG-10/rh.40 (SEQ ID No: 14 of WO2005033321), AAVLG-4/rh.38 (SEQ ID NO: 86 of WO2005033321), AAVLG-4/rh.38 (SEQ ID No: 7 of WO2005033321), AAVN721-8/rh.43 (SEQ ID NO: 163 of WO2005033321), AAVN721-8/rh.43 (SEQ ID No: 43 of WO2005033321), AAVpi.1 (WO2005033321 SEQ ID NO: 28), AAVpi.2 (WO2005033321 SEQ ID NO: 30), AAVpi.3 (WO2005033321 SEQ ID NO: 29), AAVrh.38 (SEQ ID NO: 86 of WO2005033321), AAVrh.40 (SEQ ID NO: 92 of WO2005033321), AAVrh.43 (SEQ ID NO: 163 of WO2005033321), AAVrh.44 (WO2005033321 SEQ ID NO: 34), AAVrh.45 (WO2005033321 SEQ ID NO: 41), AAVrh.47 (WO2005033321 SEQ ID NO: 38), AAVrh.48 (SEQ ID NO: 115 of WO2005033321), AAVrh.49 (SEQ ID NO: 103 of WO2005033321), AAVrh.50 (SEQ ID NO: 108 of WO2005033321), AAVrh.51 (SEQ ID NO: 104 of WO2005033321), AAVrh.52 (SEQ ID NO: 96 of WO2005033321), AAVrh.53 (SEQ ID NO: 97 of WO2005033321), AAVrh.55 (WO2005033321 SEQ ID NO: 37), AAVrh.56 (SEQ ID NO: 152 of WO2005033321), AAVrh.57 (SEQ ID NO: 105 of WO2005033321), AAVrh.58 (SEQ ID NO: 106 of WO2005033321), AAVrh.59 (WO2005033321 SEQ ID NO: 42), AAVrh.60 (WO2005033321 SEQ ID NO: 31), AAVrh.61 (SEQ ID NO: 107 of WO2005033321), AAVrh.62 (SEQ ID NO: 114 of WO2005033321), AAVrh.64 (SEQ ID NO: 99 of WO2005033321), AAVrh.65 (WO2005033321 SEQ ID NO: 35), AAVrh.68 (WO2005033321 SEQ ID NO: 16), AAVrh.69 (WO2005033321 SEQ ID NO: 39), AAVrh.70 (WO2005033321 SEQ ID NO: 20), AAVrh.72 (WO2005033321 SEQ ID NO: 9), or variants thereof including, but not limited to, AAVcy.2, AAVcy.3, AAVcy.4, AAVcy.5, AAVcy.6, AAVrh.12, AAVrh.17, AAVrh.18, AAVrh.19, AAVrh.21, AAVrh.22, AAVrh.23, AAVrh.24, AAVrh.25, AAVrh.25/42 15, AAVrh.31, AAVrh.32, AAVrh.33, AAVrh.34, AAVrh.35, AAVrh.36, AAVrh.37, AAVrh14. Non limiting examples of variants include SEQ ID NO: 13, 15, 17, 19, 24, 36, 40, 45, 47, 48, 51-54, 60-62, 64-77, 79, 80, 82, 89, 90, 93-95, 98, 100, 101, 109-113, 118-120, 124, 126, 131, 139, 142, 151,154, 158, 161, 162, 165-183, 202, 204-212, 215, 219, 224-236, of WO2005033321, the contents of which are herein incorporated by reference in their entirety.

[0443] In some embodiments, the AAV serotype may be, or have, a sequence as described in International Publication No. WO2015168666, the contents of which are herein incorporated by reference in their entirety, such as, but not limited to, AAVrh8R (SEQ ID NO: 9 of WO2015168666), AAVrh8R A586R mutant (SEQ ID NO: 10 of WO2015168666), AAVrh8R R533A mutant (SEQ ID NO: 11 of WO2015168666), or variants thereof.

[0444] In some embodiments, the AAV serotype may be, or have, a sequence as described in U.S. Pat. No. 9,233,131, the contents of which are herein incorporated by reference in their entirety, such as, but not limited to, AAVhE1.1 (SEQ ID NO:44 of U.S. Pat. No. 9,233,131), AAVhEr1.5 (SEQ ID NO:45 of U.S. Pat. No. 9,233,131), AAVhER1.14 (SEQ ID NO:46 of U.S. Pat. No. 9,233,131), AAVhEr1.8 (SEQ ID NO:47 of U.S. Pat. No. 9,233,131), AAVhEr1.16 (SEQ ID NO:48 of U.S. Pat. No. 9,233,131), AAVhEr1.18 (SEQ ID NO:49 of U.S. Pat. No. 9,233,131), AAVhEr1.35 (SEQ ID NO:50 of U.S. Pat. No. 9,233,131), AAVhEr1.7 (SEQ ID NO:51 of U.S. Pat. No. 9,233,131), AAVhEr1.36 (SEQ ID NO:52 of U.S. Pat. No. 9,233,131), AAVhEr2.29 (SEQ ID NO:53 of U.S. Pat. No. 9,233,131), AAVhEr2.4 (SEQ ID NO:54 of U.S. Pat. No. 9,233,131), AAVhEr2.16 (SEQ ID NO:55 of U.S. Pat. No. 9,233,131), AAVhEr2.30 (SEQ ID NO:56 of U.S. Pat. No. 9,233,131), AAVhEr2.31 (SEQ ID NO:58 of U.S. Pat. No. 9,233,131), AAVhEr2.36 (SEQ ID NO:57 of U.S. Pat. No. 9,233,131), AAVhER1.23 (SEQ ID NO:53 of U.S. Pat. No. 9,233,131), AAVhEr3.1 (SEQ ID NO:59 of U.S. Pat. No. 9,233,131), AAV2.5T (SEQ ID NO:42 of U.S. Pat. No. 9,233,131), or variants thereof.

[0445] In some embodiments, the AAV serotype may be, or have, a sequence as described in United States Patent Publication No. US20150376607, the contents of which are herein incorporated by reference in their entirety, such as, but not limited to, AAV-PAEC (SEQ ID NO:1 of US20150376607), AAV-LKO1 (SEQ ID NO:2 of US20150376607), AAV-LK02 (SEQ ID NO:3 of US20150376607), AAV-LK03 (SEQ ID NO:4 of US20150376607), AAV-LK04 (SEQ ID NO:5 of US20150376607), AAV-LK05 (SEQ ID NO:6 of US20150376607), AAV-LK06 (SEQ ID NO:7 of US20150376607), AAV-LK07 (SEQ ID NO:8 of US20150376607), AAV-LK08 (SEQ ID NO:9 of US20150376607), AAV-LK09 (SEQ ID NO:10 of US20150376607), AAV-LK10 (SEQ ID NO:11 of US20150376607), AAV-LK11 (SEQ ID NO:12 of US20150376607), AAV-LK12 (SEQ ID NO:13 of US20150376607), AAV-LK13 (SEQ ID NO:14 of US20150376607), AAV-LK14 (SEQ ID NO:15 of US20150376607), AAV-LK15 (SEQ ID NO:16 of US20150376607), AAV-LK16 (SEQ ID NO:17 of US20150376607), AAV-LK17 (SEQ ID NO:18 of US20150376607), AAV-LK18 (SEQ ID NO:19 of US20150376607), AAV-LK19 (SEQ ID NO:20 of US20150376607), AAV-PAEC2 (SEQ ID NO:21 of US20150376607), AAV-PAEC4 (SEQ ID NO:22 of US20150376607), AAV-PAEC6 (SEQ ID NO:23 of US20150376607), AAV-PAEC7 (SEQ ID NO:24 of US20150376607), AAV-PAEC8 (SEQ ID NO:25 of US20150376607), AAV-PAEC11 (SEQ ID NO:26 of US20150376607), AAV-PAEC12 (SEQ ID NO:27, of US20150376607), or variants thereof.

[0446] In some embodiments, the AAV serotype may be, or have, a sequence as described in U.S. Pat. No. 9,163,261, the contents of which are herein incorporated by reference in their entirety, such as, but not limited to, AAV-2-pre-miRNA-101 (SEQ ID NO: 1 U.S. Pat. No. 9,163,261), or variants thereof.

[0447] In some embodiments, the AAV serotype may be, or have, a sequence as described in United States Patent Publication No. US20150376240, the contents of which are herein incorporated by reference in their entirety, such as, but not limited to, AAV-8h (SEQ ID NO: 6 of US20150376240), AAV-8b (SEQ ID NO: 5 of US20150376240), AAV-h (SEQ ID NO: 2 of US20150376240), AAV-b (SEQ ID NO: 1 of US20150376240), or variants thereof.

[0448] In some embodiments, the AAV serotype may be, or have, a sequence as described in United States Patent Publication No. US20160017295, the contents of which are herein incorporated by reference in their entirety, such as, but not limited to, AAV SM 10-2 (SEQ ID NO: 22 of US20160017295), AAV Shuffle 100-1 (SEQ ID NO: 23 of US20160017295), AAV Shuffle 100-3 (SEQ ID NO: 24 of US20160017295), AAV Shuffle 100-7 (SEQ ID NO: 25 of US20160017295), AAV Shuffle 10-2 (SEQ ID NO: 34 of US20160017295), AAV Shuffle 10-6 (SEQ ID NO: 35 of US20160017295), AAV Shuffle 10-8 (SEQ ID NO: 36 of US20160017295), AAV Shuffle 100-2 (SEQ ID NO: 37 of US20160017295), AAV SM 10-1 (SEQ ID NO: 38 of US20160017295), AAV SM 10-8 (SEQ ID NO: 39 of US20160017295), AAV SM 100-3 (SEQ ID NO: 40 of US20160017295), AAV SM 100-10 (SEQ ID NO: 41 of US20160017295), or variants thereof.

[0449] In some embodiments, the AAV serotype may be, or have, a sequence as described in United States Patent Publication No. US20150238550, the contents of which are herein incorporated by reference in their entirety, such as, but not limited to, BNP61 AAV (SEQ ID NO: 1 of US20150238550), BNP62 AAV (SEQ ID NO: 3 of US20150238550), BNP63 AAV (SEQ ID NO: 4 of US20150238550), or variants thereof.

[0450] In some embodiments, the AAV serotype may be or may have a sequence as described in United States Patent Publication No. US20150315612, the contents of which are herein incorporated by reference in their entirety, such as, but not limited to, AAVrh.50 (SEQ ID NO: 108 of US20150315612), AAVrh.43 (SEQ ID NO: 163 of US20150315612), AAVrh.62 (SEQ ID NO: 114 of US20150315612), AAVrh.48 (SEQ ID NO: 115 of US20150315612), AAVhu.19 (SEQ ID NO: 133 of US20150315612), AAVhu.11 (SEQ ID NO: 153 of US20150315612), AAVhu.53 (SEQ ID NO: 186 of US20150315612), AAV4-8/rh.64 (SEQ ID No: 15 of US20150315612), AAVLG-9/hu.39 (SEQ ID No: 24 of US20150315612), AAV54.5/hu.23 (SEQ ID No: 60 of US20150315612), AAV54.2/hu.22 (SEQ ID No: 67 of US20150315612), AAV54.7/hu.24 (SEQ ID No: 66 of US20150315612), AAV54.1/hu.21 (SEQ ID No: 65 of US20150315612), AAV54.4R/hu.27 (SEQ ID No: 64 of US20150315612), AAV46.2/hu.28 (SEQ ID No: 68 of US20150315612), AAV46.6/hu.29 (SEQ ID No: 69 of US20150315612), AAV128.1/hu.43 (SEQ ID No: 80 of US20150315612), or variants thereof.

[0451] In some embodiments, the AAV serotype may be, or have, a sequence as described in International Publication No. WO2015121501, the contents of which are herein incorporated by reference in their entirety, such as, but not limited to, true type AAV (ttAAV) (SEQ ID NO: 2 of WO2015121501), “UPenn AAV10” (SEQ ID NO: 8 of WO2015121501), “Japanese AAV10” (SEQ ID NO: 9 of WO2015121501), or variants thereof.

[0452] According to the present disclosure, AAV capsid serotype selection or use may be from a variety of species. In some embodiments, the AAV may be an avian AAV (AAAV). The AAAV serotype may be, or have, a sequence as described in U.S. Pat. No. 9,238,800, the contents of which are herein incorporated by reference in their entirety, such as, but not limited to, AAAV (SEQ ID NO: 1, 2, 4, 6, 8, 10, 12, and 14 of U.S. Pat. No. 9,238,800), or variants thereof.

[0453] In some embodiments, the AAV may be a bovine AAV (BAAV). The BAAV serotype may be, or have, a sequence as described in U.S. Pat. No. 9,193,769, the contents of which are herein incorporated by reference in their entirety, such as, but not limited to, BAAV (SEQ ID NO: 1 and 6 of U.S. Pat. No. 9,193,769), or variants thereof. The BAAV serotype may be or have a sequence as described in U.S. Pat. No. 7,427,396, the contents of which are herein incorporated by reference in their entirety, such as, but not limited to, BAAV (SEQ ID NO: 5 and 6 of U.S. Pat. No. 7,427,396), or variants thereof.

[0454] In some embodiments, the AAV may be a caprine AAV. The caprine AAV serotype may be, or have, a sequence as described in U.S. Pat. No. 7,427,396, the contents of which are herein incorporated by reference in their entirety, such as, but not limited to, caprine AAV (SEQ ID NO: 3 of U.S. Pat. No. 7,427,396), or variants thereof.

[0455] In other embodiments the AAV may be engineered as a hybrid AAV from two or more parental serotypes. In some embodiments, the AAV may be AAV2G9 which comprises sequences from AAV2 and AAV9. The AAV2G9 AAV serotype may be, or have, a sequence as described in United States Patent Publication No. US20160017005, the contents of which are herein incorporated by reference in their entirety.

[0456] In some embodiments, the AAV may be a serotype generated by the AAV9 capsid library with mutations in amino acids 390-627 (VP1 numbering) as described by Pulicherla et al. (Molecular Therapy 19(6):1070-1078 (2011), the contents of which are herein incorporated by reference in their entirety. The serotype and corresponding nucleotide and amino acid substitutions may be, but is not limited to, AAV9.1 (G1594C; D532H), AAV6.2 (T1418A and T1436X; V473D and I479K), AAV9.3 (T1238A; F413Y), AAV9.4 (T1250C and A1617T; F417S), AAV9.5 (A1235G, A1314T, A1642G, C1760T; Q412R, T548A, A587V), AAV9.6 (T1231A; F411I), AAV9.9 (G1203A, G1785T; W595C), AAV9.10 (A1500G, T1676C; M559T), AAV9.11 (A1425T, A1702C, A1769T; T568P, Q590L), AAV9.13 (A1369C, A1720T; N457H, T574S), AAV9.14 (T1340A, T1362C, T1560C, G1713A; L447H), AAV9.16 (A1775T; Q592L), AAV9.24 (T1507C, T1521G; W503R), AAV9.26 (A1337G, A1769C; Y446C, Q590P), AAV9.33 (A1667C; D556A), AAV9.34 (A1534G, C1794T; N512D), AAV9.35 (A1289T, T1450A, C1494T, A1515T, C1794A, G1816A; Q430L, Y484N, N98K, V606I), AAV9.40 (A1694T, E565V), AAV9.41 (A1348T, T1362C; T450S), AAV9.44 (A1684C, A1701T, A1737G; N562H, K567N), AAV9.45 (A1492T, C1804T; N498Y, L602F), AAV9.46 (G1441C, T1525C, T1549G; G481R, W509R, L517V), 9.47 (G1241A, G1358A, A1669G, C1745T; S414N, G453D, K557E, T582I), AAV9.48 (C1445T, A1736T; P482L, Q579L), AAV9.50 (A1638T, C1683T, T1805A; Q546H, L602H), AAV9.53 (G1301A, A1405C, C1664T, G1811T; R134Q, S469R, A555V, G604V), AAV9.54 (C1531A, T1609A; L511I, L537M), AAV9.55 (T1605A; F535L), AAV9.58 (C1475T, C1579A; T492I, H527N), AAV.59 (T1336C; Y446H), AAV9.61 (A1493T; N498I), AAV9.64 (C1531A, A1617T; L511I), AAV9.65 (C1335T, T1530C, C1568A; A523D), AAV9.68 (C1510A; P504T), AAV9.80 (G1441A; G481R), AAV9.83 (C1402A, A1500T; P468T, E500D), AAV9.87 (T1464C, T1468C; S490P), AAV9.90 (A1196T; Y399F), AAV9.91 (T1316G, A1583T, C1782G, T1806C; L439R, K528I), AAV9.93 (A1273G, A1421G, A1638C, C1712T, G1732A, A1744T, A1832T; S425G, Q474R, Q546H, P571L, G578R, T582S, D611V), AAV9.94 (A1675T; M559L) and AAV9.95 (T1605A; F535L).

[0457] In some embodiments, the AAV serotype may be, or have, a sequence as described in International Publication No. WO2016049230, the contents of which are herein incorporated by reference in their entirety, such as, but not limited to AAVF1/HSC1 (SEQ ID NO: 2 and 20 of WO2016049230), AAVF2/HSC2 (SEQ ID NO: 3 and 21 of WO2016049230), AAVF3/HSC3 (SEQ ID NO: 5 and 22 of WO2016049230), AAVF4/HSC4 (SEQ ID NO: 6 and 23 of WO2016049230), AAVF5/HSC5 (SEQ ID NO: 11 and 25 of WO2016049230), AAVF6/HSC6 (SEQ ID NO: 7 and 24 of WO2016049230), AAVF7/HSC7 (SEQ ID NO: 8 and 27 of WO2016049230), AAVF8/HSC8 (SEQ ID NO: 9 and 28 of WO2016049230), AAVF9/HSC9 (SEQ ID NO: 10 and 29 of WO2016049230), AAVF11/HSC11 (SEQ ID NO: 4 and 26 of WO2016049230), AAVF12/HSC12 (SEQ ID NO: 12 and 30 of WO2016049230), AAVF13/HSC13 (SEQ ID NO: 14 and 31 of WO2016049230), AAVF14/HSC14 (SEQ ID NO: 15 and 32 of WO2016049230), AAVF15/HSC15 (SEQ ID NO: 16 and 33 of WO2016049230), AAVF16/HSC16 (SEQ ID NO: 17 and 34 of WO2016049230), AAVF17/HSC17 (SEQ ID NO: 13 and 35 of WO2016049230), or variants or derivatives thereof.

[0458] In some embodiments, the AAV serotype may be, or have, a sequence as described in U.S. Pat. No. 8,734,809, the contents of which are herein incorporated by reference in their entirety, such as, but not limited to, AAV CBr-E1 (SEQ ID NO: 13 and 87 of U.S. Pat. No. 8,734,809), AAV CBr-E2 (SEQ ID NO: 14 and 88 of U.S. Pat. No. 8,734,809), AAV CBr-E3 (SEQ ID NO: 15 and 89 of U.S. Pat. No. 8,734,809), AAV CBr-E4 (SEQ ID NO: 16 and 90 of U.S. Pat. No. 8,734,809), AAV CBr-E5 (SEQ ID NO: 17 and 91 of U.S. Pat. No. 8,734,809), AAV CBr-e5 (SEQ ID NO: 18 and 92 of U.S. Pat. No. 8,734,809), AAV CBr-E6 (SEQ ID NO: 19 and 93 of U.S. Pat. No. 8,734,809), AAV CBr-E7 (SEQ ID NO: 20 and 94 of U.S. Pat. No. 8,734,809), AAV CBr-E8 (SEQ ID NO: 21 and 95 of U.S. Pat. No. 8,734,809), AAV CLv-D1 (SEQ ID NO: 22 and 96 of U.S. Pat. No. 8,734,809), AAV CLv-D2 (SEQ ID NO: 23 and 97 of U.S. Pat. No. 8,734,809), AAV CLv-D3 (SEQ ID NO: 24 and 98 of U.S. Pat. No. 8,734,809), AAV CLv-D4 (SEQ ID NO: 25 and 99 of U.S. Pat. No. 8,734,809), AAV CLv-D5 (SEQ ID NO: 26 and 100 of U.S. Pat. No. 8,734,809), AAV CLv-D6 (SEQ ID NO: 27 and 101 of U.S. Pat. No. 8,734,809), AAV CLv-D7 (SEQ ID NO: 28 and 102 of U.S. Pat. No. 8,734,809), AAV CLv-D8 (SEQ ID NO: 29 and 103 of U.S. Pat. No. 8,734,809), AAV CLv-E1 (SEQ ID NO: 13 and 87 of U.S. Pat. No. 8,734,809), AAV CLv-R1 (SEQ ID NO: 30 and 104 of U.S. Pat. No. 8,734,809), AAV CLv-R2 (SEQ ID NO: 31 and 105 of U.S. Pat. No. 8,734,809), AAV CLv-R3 (SEQ ID NO: 32 and 106 of U.S. Pat. No. 8,734,809), AAV CLv-R4 (SEQ ID NO: 33 and 107 of U.S. Pat. No. 8,734,809), AAV CLv-R5 (SEQ ID NO: 34 and 108 of U.S. Pat. No. 8,734,809), AAV CLv-R6 (SEQ ID NO: 35 and 109 of U.S. Pat. No. 8,734,809), AAV CLv-R7 (SEQ ID NO: 36 and 110 of U.S. Pat. No. 8,734,809), AAV CLv-R8 (SEQ ID NO: X and X of U.S. Pat. No. 8,734,809), AAV CLv-R9 (SEQ ID NO: X and X of U.S. Pat. No. 8,734,809), AAV CLg-F1 (SEQ ID NO: 39 and 113 of U.S. Pat. No. 8,734,809), AAV CLg-F2 (SEQ ID NO: 40 and 114 of U.S. Pat. No. 8,734,809), AAV CLg-F3 (SEQ ID NO: 41 and 115 of U.S. Pat. No. 8,734,809), AAV CLg-F4 (SEQ ID NO: 42 and 116 of U.S. Pat. No. 8,734,809), AAV CLg-F5 (SEQ ID NO: 43 and 117 of U.S. Pat. No. 8,734,809), AAV CLg-F6 (SEQ ID NO: 43 and 117 of U.S. Pat. No. 8,734,809), AAV CLg-F7 (SEQ ID NO: 44 and 118 of U.S. Pat. No. 8,734,809), AAV CLg-F8 (SEQ ID NO: 43 and 117 of U.S. Pat. No. 8,734,809), AAV CSp-1 (SEQ ID NO: 45 and 119 of U.S. Pat. No. 8,734,809), AAV CSp-10 (SEQ ID NO: 46 and 120 of U.S. Pat. No. 8,734,809), AAV CSp-11 (SEQ ID NO: 47 and 121 of U.S. Pat. No. 8,734,809), AAV CSp-2 (SEQ ID NO: 48 and 122 of U.S. Pat. No. 8,734,809), AAV CSp-3 (SEQ ID NO: 49 and 123 of U.S. Pat. No. 8,734,809), AAV CSp-4 (SEQ ID NO: 50 and 124 of U.S. Pat. No. 8,734,809), AAV CSp-6 (SEQ ID NO: 51 and 125 of U.S. Pat. No. 8,734,809), AAV CSp-7 (SEQ ID NO: 52 and 126 of U.S. Pat. No. 8,734,809), AAV CSp-8 (SEQ ID NO: 53 and 127 of U.S. Pat. No. 8,734,809), AAV CSp-9 (SEQ ID NO: 54 and 128 of U.S. Pat. No. 8,734,809), AAV CHt-2 (SEQ ID NO: 55 and 129 of U.S. Pat. No. 8,734,809), AAV CHt-3 (SEQ ID NO: 56 and 130 of U.S. Pat. No. 8,734,809), AAV CKd-1 (SEQ ID NO: 57 and 131 of U.S. Pat. No. 8,734,809), AAV CKd-10 (SEQ ID NO: 58 and 132 of U.S. Pat. No. 8,734,809), AAV CKd-2 (SEQ ID NO: 59 and 133 of U.S. Pat. No. 8,734,809), AAV CKd-3 (SEQ ID NO: 60 and 134 of U.S. Pat. No. 8,734,809), AAV CKd-4 (SEQ ID NO: 61 and 135 of U.S. Pat. No. 8,734,809), AAV CKd-6 (SEQ ID NO: 62 and 136 of U.S. Pat. No. 8,734,809), AAV CKd-7 (SEQ ID NO: 63 and 137 of U.S. Pat. No. 8,734,809), AAV CKd-8 (SEQ ID NO: 64 and 138 of U.S. Pat. No. 8,734,809), AAV CLv-1 (SEQ ID NO: 35 and 139 of U.S. Pat. No. 8,734,809), AAV CLv-12 (SEQ ID NO: 66 and 140 of U.S. Pat. No. 8,734,809), AAV CLv-13 (SEQ ID NO: 67 and 141 of U.S. Pat. No. 8,734,809), AAV CLv-2 (SEQ ID NO: 68 and 142 of U.S. Pat. No. 8,734,809), AAV CLv-3 (SEQ ID NO: 69 and 143 of U.S. Pat. No. 8,734,809), AAV CLv-4 (SEQ ID NO: 70 and 144 of U.S. Pat. No. 8,734,809), AAV CLv-6 (SEQ ID NO: 71 and 145 of U.S. Pat. No. 8,734,809), AAV CLv-8 (SEQ ID NO: 72 and 146 of U.S. Pat. No. 8,734,809), AAV CKd-B1 (SEQ ID NO: 73 and 147 of U.S. Pat. No. 8,734,809), AAV CKd-B2 (SEQ ID NO: 74 and 148 of U.S. Pat. No. 8,734,809), AAV CKd-B3 (SEQ ID NO: 75 and 149 of U.S. Pat. No. 8,734,809), AAV CKd-B4 (SEQ ID NO: 76 and 150 of U.S. Pat. No. 8,734,809), AAV CKd-B5 (SEQ ID NO: 77 and 151 of U.S. Pat. No. 8,734,809), AAV CKd-B6 (SEQ ID NO: 78 and 152 of U.S. Pat. No. 8,734,809), AAV CKd-B7 (SEQ ID NO: 79 and 153 of U.S. Pat. No. 8,734,809), AAV CKd-B8 (SEQ ID NO: 80 and 154 of U.S. Pat. No. 8,734,809), AAV CKd-H1 (SEQ ID NO: 81 and 155 of U.S. Pat. No. 8,734,809), AAV CKd-H2 (SEQ ID NO: 82 and 156 of U.S. Pat. No. 8,734,809), AAV CKd-H3 (SEQ ID NO: 83 and 157 of U.S. Pat. No. 8,734,809), AAV CKd-H4 (SEQ ID NO: 84 and 158 of U.S. Pat. No. 8,734,809), AAV CKd-H5 (SEQ ID NO: 85 and 159 of U.S. Pat. No. 8,734,809), AAV CKd-H6 (SEQ ID NO: 77 and 151 of U.S. Pat. No. 8,734,809), AAV CHt-1 (SEQ ID NO: 86 and 160 of U.S. Pat. No. 8,734,809), AAV CLv1-1 (SEQ ID NO: 171 of U.S. Pat. No. 8,734,809), AAV CLv1-2 (SEQ ID NO: 172 of U.S. Pat. No. 8,734,809), AAV CLv1-3 (SEQ ID NO: 173 of U.S. Pat. No. 8,734,809), AAV CLv1-4 (SEQ ID NO: 174 of U.S. Pat. No. 8,734,809), AAV Clv1-7 (SEQ ID NO: 175 of U.S. Pat. No. 8,734,809), AAV Clv1-8 (SEQ ID NO: 176 of U.S. Pat. No. 8,734,809), AAV Clv1-9 (SEQ ID NO: 177 of U.S. Pat. No. 8,734,809), AAV Clv1-10 (SEQ ID NO: 178 of U.S. Pat. No. 8,734,809), AAV.VR-355 (SEQ ID NO: 181 of U.S. Pat. No. 8,734,809), AAV.hu.48R3 (SEQ ID NO: 183 of U.S. Pat. No. 8,734,809), or variants or derivatives thereof.

[0459] In some embodiments, the AAV serotype may be, or have, a sequence as described in International Publication No. WO2016065001, the contents of which are herein incorporated by reference in their entirety, such as, but not limited to AAV CHt-P2 (SEQ ID NO: 1 and 51 of WO2016065001), AAV CHt-P5 (SEQ ID NO: 2 and 52 of WO2016065001), AAV CHt-P9 (SEQ ID NO: 3 and 53 of WO2016065001), AAV CBr-7.1 (SEQ ID NO: 4 and 54 of WO2016065001), AAV CBr-7.2 (SEQ ID NO: 5 and 55 of WO2016065001), AAV CBr-7.3 (SEQ ID NO: 6 and 56 of WO2016065001), AAV CBr-7.4 (SEQ ID NO: 7 and 57 of WO2016065001), AAV CBr-7.5 (SEQ ID NO: 8 and 58 of WO2016065001), AAV CBr-7.7 (SEQ ID NO: 9 and 59 of WO2016065001), AAV CBr-7.8 (SEQ ID NO: 10 and 60 of WO2016065001), AAV CBr-7.10 (SEQ ID NO: 11 and 61 of WO2016065001), AAV CKd-N3 (SEQ ID NO: 12 and 62 of WO2016065001), AAV CKd-N4 (SEQ ID NO: 13 and 63 of WO2016065001), AAV CKd-N9 (SEQ ID NO: 14 and 64 of WO2016065001), AAV CLv-L4 (SEQ ID NO: 15 and 65 of WO2016065001), AAV CLv-L5 (SEQ ID NO: 16 and 66 of WO2016065001), AAV CLv-L6 (SEQ ID NO: 17 and 67 of WO2016065001), AAV CLv-K1 (SEQ ID NO: 18 and 68 of WO2016065001), AAV CLv-K3 (SEQ ID NO: 19 and 69 of WO2016065001), AAV CLv-K6 (SEQ ID NO: 20 and 70 of WO2016065001), AAV CLv-M1 (SEQ ID NO: 21 and 71 of WO2016065001), AAV CLv-M11 (SEQ ID NO: 22 and 72 of WO2016065001), AAV CLv-M2 (SEQ ID NO: 23 and 73 of WO2016065001), AAV CLv-M5 (SEQ ID NO: 24 and 74 of WO2016065001), AAV CLv-M6 (SEQ ID NO: 25 and 75 of WO2016065001), AAV CLv-M7 (SEQ ID NO: 26 and 76 of WO2016065001), AAV CLv-M8 (SEQ ID NO: 27 and 77 of WO2016065001), AAV CLv-M9 (SEQ ID NO: 28 and 78 of WO2016065001), AAV CHt-P1 (SEQ ID NO: 29 and 79 of WO2016065001), AAV CHt-P6 (SEQ ID NO: 30 and 80 of WO2016065001), AAV CHt-P8 (SEQ ID NO: 31 and 81 of WO2016065001), AAV CHt-6.1 (SEQ ID NO: 32 and 82 of WO2016065001), AAV CHt-6.10 (SEQ ID NO: 33 and 83 of WO2016065001), AAV CHt-6.5 (SEQ ID NO: 34 and 84 of WO2016065001), AAV CHt-6.6 (SEQ ID NO: 35 and 85 of WO2016065001), AAV CHt-6.7 (SEQ ID NO: 36 and 86 of WO2016065001), AAV CHt-6.8 (SEQ ID NO: 37 and 87 of WO2016065001), AAV CSp-8.10 (SEQ ID NO: 38 and 88 of WO2016065001), AAV CSp-8.2 (SEQ ID NO: 39 and 89 of WO2016065001), AAV CSp-8.4 (SEQ ID NO: 40 and 90 of WO2016065001), AAV CSp-8.5 (SEQ ID NO: 41 and 91 of WO2016065001), AAV CSp-8.6 (SEQ ID NO: 42 and 92 of WO2016065001), AAV CSp-8.7 (SEQ ID NO: 43 and 93 of WO2016065001), AAV CSp-8.8 (SEQ ID NO: 44 and 94 of WO2016065001), AAV CSp-8.9 (SEQ ID NO: 45 and 95 of WO2016065001), AAV CBr-B7.3 (SEQ ID NO: 46 and 96 of WO2016065001), AAV CBr-B7.4 (SEQ ID NO: 47 and 97 of WO2016065001), AAV3B (SEQ ID NO: 48 and 98 of WO2016065001), AAV4 (SEQ ID NO: 49 and 99 of WO2016065001), AAV5 (SEQ ID NO: 50 and 100 of WO2016065001), or variants or derivatives thereof.

[0460] In some embodiments, the AAV particle may have, or may be a serotype selected from any of those found in Table 1.

[0461] In some embodiments, the AAV capsid may comprise a sequence, fragment or variant thereof, of any of the sequences in Table 1.

[0462] In some embodiments, the AAV capsid may be encoded by a sequence, fragment or variant as described in Table 1.

[0463] In any of the DNA and RNA sequences referenced and/or described herein, the single letter symbol has the following description: A for adenine; C for cytosine; G for guanine; T for thymine; U for Uracil; W for weak bases such as adenine or thymine; S for strong nucleotides such as cytosine and guanine; M for amino nucleotides such as adenine and cytosine; K for keto nucleotides such as guanine and thymine; R for purines adenine and guanine; Y for pyrimidine cytosine and thymine; B for any base that is not A (e.g., cytosine, guanine, and thymine); D for any base that is not C (e.g., adenine, guanine, and thymine); H for any base that is not G (e.g., adenine, cytosine, and thymine); V for any base that is not T (e.g., adenine, cytosine, and guanine); N for any nucleotide (which is not a gap); and Z is for zero.

[0464] In any of the amino acid sequences referenced and/or described herein, the single letter symbol has the following description: G (Gly) for Glycine; A (Ala) for Alanine; L (Leu) for Leucine; M (Met) for Methionine; F (Phe) for Phenylalanine; W (Trp) for Tryptophan; K (Lys) for Lysine; Q (Gln) for Glutamine; E (Glu) for Glutamic Acid; S (Ser) for Serine; P (Pro) for Proline; V (Val) for Valine; I (Ile) for Isoleucine; C (Cys) for Cysteine; Y (Tyr) for Tyrosine; H (His) for Histidine; R (Arg) for Arginine; N (Asn) for Asparagine; D (Asp) for Aspartic Acid; T (Thr) for Threonine; B (Asx) for Aspartic acid or Asparagine; J (Xle) for Leucine or Isoleucine; 0 (Pyl) for Pyrrolysine; U (Sec) for Selenocysteine; X (Xaa) for any amino acid; and Z (Glx) for Glutamine or Glutamic acid.

TABLE 1
AAV Serotypes

| Serotype | SEQ ID NO: | Reference Information |
|---|---|---|
| VOY101 | 1 | — |
| VOY101 | 2 | — |
| VOY201 | 3 | — |
| PHP.N/PHP.B-DGT | 4 | WO2017100671 SEQ ID NO: 46 |
| AAVPHP.B or G2B-26 | 5 | WO2015038958 SEQ ID NO: 8 and 13 |
| AAVPHP.B | 6 | WO2015038958 SEQ ID NO: 9 |
| AAVG2B-13 | 7 | WO2015038958 SEQ ID NO: 12 |
| AAVTH1.1-32 | 8 | WO2015038958 SEQ ID NO: 14 |
| AAVTH1.1-35 | 9 | WO2015038958 SEQ ID NO: 15 |
| PHP.S/G2A12 | 10 | WO2017100671 SEQ ID NO: 47 |
| AAV9/hu.14 K449R | 11 | WO2017100671 SEQ ID NO: 45 |
| AAV1 | 12 | US20150159173 SEQ ID NO: 11, |
| | | US20150315612 SEQ ID NO: 202 |
| AAV1 | 13 | US20160017295 SEQ ID NO: 1, |
| | | US20030138772 SEQ ID NO: 64, |
| | | US20150159173 SEQ ID NO: 27, |
| | | US20150315612 SEQ ID NO: 219, |
| | | U.S. Pat. No. 7,198,951 SEQ ID NO: 5 |
| AAV1 | 14 | US20030138772 SEQ ID NO: 6 |
| AAV1.3 | 15 | US20030138772 SEQ ID NO: 14 |
| AAV10 | 16 | US20030138772 SEQ ID NO: 117 |
| AAV10 | 17 | WO2015121501 SEQ ID NO: 9 |
| AAV10 | 18 | WO2015121501 SEQ ID NO: 8 |
| AAV11 | 19 | US20030138772 SEQ ID NO: 118 |
| AAV12 | 20 | US20030138772 SEQ ID NO: 119 |
| AAV2 | 21 | US20150159173 SEQ ID NO: 7, |
| | | US20150315612 SEQ ID NO: 211 |
| AAV2 | 22 | US20030138772 SEQ ID NO: 70, |
| | | US20150159173 SEQ ID NO: 23, |
| | | US20150315612 SEQ ID NO: 221, |
| | | US20160017295 SEQ ID NO: 2, |
| | | U.S. Pat. No. 6,156,303 SEQ ID NO: 4, |
| | | U.S. Pat. No. 7,198,951 SEQ ID NO: 4, |
| | | WO2015121501 SEQ ID NO: 1 |
| AAV2 | 23 | U.S. Pat. No. 6,156,303 SEQ ID NO: 8 |
| AAV2 | 24 | US20030138772 SEQ ID NO: 7 |
| AAV2 | 25 | U.S. Pat. No. 6,156,303 SEQ ID NO: 3 |
| AAV2.5T | 26 | U.S. Pat. No. 9,233,131 SEQ ID NO: 42 |
| AAV223.10 | 27 | US20030138772 SEQ ID NO: 75 |
| AAV223.2 | 28 | US20030138772 SEQ ID NO: 49 |
| AAV223.2 | 29 | US20030138772 SEQ ID NO: 76 |
| AAV223.4 | 30 | US20030138772 SEQ ID NO: 50 |
| AAV223.4 | 31 | US20030138772 SEQ ID NO: 73 |
| AAV223.5 | 32 | US20030138772 SEQ ID NO: 51 |
| AAV223.5 | 33 | US20030138772 SEQ ID NO: 74 |
| AAV223.6 | 34 | US20030138772 SEQ ID NO: 52 |
| AAV223.6 | 35 | US20030138772 SEQ ID NO: 78 |
| AAV223.7 | 36 | US20030138772 SEQ ID NO: 53 |
| AAV223.7 | 37 | US20030138772 SEQ ID NO: 77 |
| AAV29.3 | 38 | US20030138772 SEQ ID NO: 82 |
| AAV29.4 | 39 | US20030138772 SEQ ID NO: 12 |
| AAV29.5 | 40 | US20030138772 SEQ ID NO: 83 |
| AAV29.5 (AAVbb.2) | 41 | US20030138772 SEQ ID NO: 13 |
| AAV3 | 42 | US20150159173 SEQ ID NO: 12 |
| AAV3 | 43 | US20030138772 SEQ ID NO: 71, |
| | | US20150159173 SEQ ID NO: 28, |
| | | US20160017295 SEQ ID NO: 3, |
| | | U.S. Pat. No. 7,198,951 SEQ ID NO: 6 |
| AAV3 | 44 | US20030138772 SEQ ID NO: 8 |
| AAV3.3b | 45 | US20030138772 SEQ ID NO: 72 |
| AAV3-3 | 46 | US20150315612 SEQ ID NO: 200 |
| AAV3-3 | 47 | US20150315612 SEQ ID NO: 217 |
| AAV3a | 48 | U.S. Pat. No. 6,156,303 SEQ ID NO: 5 |
| AAV3a | 49 | U.S. Pat. No. 6,156,303 SEQ ID NO: 9 |
| AAV3b | 50 | U.S. Pat. No. 6,156,303 SEQ ID NO: 6 |
| AAV3b | 51 | U.S. Pat. No. 6,156,303 SEQ ID NO: 10 |
| AAV3b | 52 | U.S. Pat. No. 6,156,303 SEQ ID NO: 1 |
| AAV4 | 53 | US20140348794 SEQ ID NO: 17 |
| AAV4 | 54 | US20140348794 SEQ ID NO: 5 |
| AAV4 | 55 | US20140348794 SEQ ID NO: 3 |
| AAV4 | 56 | US20140348794 SEQ ID NO: 14 |
| AAV4 | 57 | US20140348794 SEQ ID NO: 15 |
| AAV4 | 58 | US20140348794 SEQ ID NO: 19 |
| AAV4 | 59 | US20140348794 SEQ ID NO: 12 |
| AAV4 | 60 | US20140348794 SEQ ID NO: 13 |
| AAV4 | 61 | US20140348794 SEQ ID NO: 7 |
| AAV4 | 62 | US20140348794 SEQ ID NO: 8 |
| AAV4 | 63 | US20140348794 SEQ ID NO: 9 |
| AAV4 | 64 | US20140348794 SEQ ID NO: 2 |
| AAV4 | 65 | US20140348794 SEQ ID NO: 10 |
| AAV4 | 66 | US20140348794 SEQ ID NO: 11 |
| AAV4 | 67 | US20140348794 SEQ ID NO: 18 |
| AAV4 | 68 | US20030138772 SEQ ID NO: 63, |
| | | US20160017295 SEQ ID NO: 4, |
| | | US20140348794 SEQ ID NO: 4 |
| AAV4 | 69 | US20140348794 SEQ ID NO: 16 |
| AAV4 | 70 | US20140348794 SEQ ID NO: 20 |
| AAV4 | 71 | US20140348794 SEQ ID NO: 6 |
| AAV4 | 72 | US20140348794 SEQ ID NO: 1 |
| AAV42.2 | 73 | US20030138772 SEQ ID NO: 9 |
| AAV42.2 | 74 | US20030138772 SEQ ID NO: 102 |
| AAV42.3b | 75 | US20030138772 SEQ ID NO: 36 |
| AAV42.3B | 76 | US20030138772 SEQ ID NO: 107 |
| AAV42.4 | 77 | US20030138772 SEQ ID NO: 33 |
| AAV42.4 | 78 | US20030138772 SEQ ID NO: 88 |
| AAV42.8 | 79 | US20030138772 SEQ ID NO: 27 |
| AAV42.8 | 80 | US20030138772 SEQ ID NO: 85 |
| AAV43.1 | 81 | US20030138772 SEQ ID NO: 39 |
| AAV43.1 | 82 | US20030138772 SEQ ID NO: 92 |
| AAV43.12 | 83 | US20030138772 SEQ ID NO: 41 |
| AAV43.12 | 84 | US20030138772 SEQ ID NO: 93 |
| AAV43.20 | 85 | US20030138772 SEQ ID NO: 42 |
| AAV43.20 | 86 | US20030138772 SEQ ID NO: 99 |
| AAV43.21 | 87 | US20030138772 SEQ ID NO: 43 |
| AAV43.21 | 88 | US20030138772 SEQ ID NO: 96 |
| AAV43.23 | 89 | US20030138772 SEQ ID NO: 44 |
| AAV43.23 | 90 | US20030138772 SEQ ID NO: 98 |
| AAV43.25 | 91 | US20030138772 SEQ ID NO: 45 |
| AAV43.25 | 92 | US20030138772 SEQ ID NO: 97 |
| AAV43.5 | 93 | US20030138772 SEQ ID NO: 40 |
| AAV43.5 | 94 | US20030138772 SEQ ID NO: 94 |
| AAV4-4 | 95 | US20150315612 SEQ ID NO: 201 |
| AAV4-4 | 96 | US20150315612 SEQ ID NO: 218 |
| AAV44.1 | 97 | US20030138772 SEQ ID NO: 46 |
| AAV44.1 | 98 | US20030138772 SEQ ID NO: 79 |
| AAV44.5 | 99 | US20030138772 SEQ ID NO: 47 |
| AAV44.5 | 100 | US20030138772 SEQ ID NO: 80 |
| AAV4407 | 101 | US20150315612 SEQ ID NO: 90 |
| AAV5 | 102 | U.S. Pat. No. 7,427,396 SEQ ID NO: 1 |
| AAV5 | 103 | US20030138772 SEQ ID NO: 114 |
| AAV5 | 104 | US20160017295 SEQ ID NO: 5, |
| | | U.S. Pat. No. 7,427,396 SEQ ID NO: 2, |
| | | US20150315612 SEQ ID NO: 216 |
| AAV5 | 105 | US20150315612 SEQ ID NO: 199 |
| AAV6 | 106 | US20150159173 SEQ ID NO: 13 |
| AAV6 | 107 | US20030138772 SEQ ID NO: 65, |
| | | US20150159173 SEQ ID NO: 29, |
| | | US20160017295 SEQ ID NO: 6, |
| | | U.S. Pat. No. 6,156,303 SEQ ID NO: 7 |
| AAV6 | 108 | U.S. Pat. No. 6,156,303 SEQ ID NO: 11 |
| AAV6 | 109 | U.S. Pat. No. 6,156,303 SEQ ID NO: 2 |
| AAV6 | 110 | US20150315612 SEQ ID NO: 203 |
| AAV6 | 111 | US20150315612 SEQ ID NO: 220 |
| AAV6.1 | 112 | US20150159173 |
| AAV6.12 | 113 | US20150159173 |
| AAV6.2 | 114 | US20150159173 |
| AAV7 | 115 | US20150159173 SEQ ID NO: 14 |
| AAV7 | 116 | US20150315612 SEQ ID NO: 183 |
| AAV7 | 117 | US20030138772 SEQ ID NO: 2, |
| | | US20150159173 SEQ ID NO: 30, |
| | | US20150315612 SEQ ID NO: 181, |
| | | US20160017295 SEQ ID NO: 7 |
| AAV7 | 118 | US20030138772 SEQ ID NO: 3 |
| AAV7 | 119 | US20030138772 SEQ ID NO: 1, |
| | | US20150315612 SEQ ID NO: 180 |
| AAV7 | 120 | US20150315612 SEQ ID NO: 213 |
| AAV7 | 121 | US20150315612 SEQ ID NO: 222 |
| AAV8 | 122 | US20150159173 SEQ ID NO: 15 |
| AAV8 | 123 | US20150376240 SEQ ID NO: 7 |
| AAV8 | 124 | US20030138772 SEQ ID NO: 4, |
| | | US20150315612 SEQ ID NO: 182 |
| AAV8 | 125 | US20030138772 SEQ ID NO: 95, |
| | | US20140359799 SEQ ID NO: 1, |
| | | US20150159173 SEQ ID NO: 31, |
| | | US20160017295 SEQ ID NO: 8, |
| | | U.S. Pat. No. 7,198,951 SEQ ID NO: 7, |
| | | US20150315612 SEQ ID NO: 223 |
| AAV8 | 126 | US20150376240 SEQ ID NO: 8 |
| AAV8 | 127 | US20150315612 SEQ ID NO: 214 |
| AAV-8b | 128 | US20150376240 SEQ ID NO: 5 |
| AAV-8b | 129 | US20150376240 SEQ ID NO: 3 |
| AAV-8h | 130 | US20150376240 SEQ ID NO: 6 |
| AAV-8h | 131 | US20150376240 SEQ ID NO: 4 |
| AAV9 | 132 | US20030138772 SEQ ID NO: 5 |
| AAV9 | 133 | U.S. Pat. No. 7,198,951 SEQ ID NO: 1 |
| AAV9 | 134 | US20160017295 SEQ ID NO: 9 |
| AAV9 | 135 | US20030138772 SEQ ID NO: 100, |
| | | U.S. Pat. No. 7,198,951 SEQ ID NO: 2 |
| AAV9 | 136 | U.S. Pat. No. 7,198,951 SEQ ID NO: 3 |
| AAV9 (AAVhu.14) | 137 | U.S. Pat. No. 7,906,111 SEQ ID NO: 3; |
| | | WO2015038958 SEQ ID NO: 11 |
| AAV9 (AAVhu.l4) | 138 | U.S. Pat. No. 7,906,111 SEQ ID NO: 123; |
| | | WO2015038958 SEQ ID NO: 2 |
| AAVA3.1 | 139 | US20030138772 SEQ ID NO: 120 |
| AAVA3.3 | 140 | US20030138772 SEQ ID NO: 57 |
| AAVA3.3 | 141 | US20030138772 SEQ ID NO: 66 |
| AAVA3.4 | 142 | US20030138772 SEQ ID NO: 54 |
| AAVA3.4 | 143 | US20030138772 SEQ ID NO: 68 |
| AAVA3.5 | 144 | US20030138772 SEQ ID NO: 55 |
| AAVA3.5 | 145 | US20030138772 SEQ ID NO: 69 |
| AAVA3.7 | 146 | US20030138772 SEQ ID NO: 56 |
| AAVA3.7 | 147 | US20030138772 SEQ ID NO: 67 |
| AAV29.3 (AAVbb.1) | 148 | US20030138772 SEQ ID NO: 11 |
| AAVC2 | 149 | US20030138772 SEQ ID NO: 61 |
| AAVCh.5 | 150 | US20150159173 SEQ ID NO: 46, |
| | | US20150315612 SEQ ID NO: 234 |
| AAVcy.2 (AAV13.3) | 151 | US20030138772 SEQ ID NO: 15 |
| AAV24.1 | 152 | US20030138772 SEQ ID NO: 101 |
| AAVcy.3 (AAV24.1) | 153 | US20030138772 SEQ ID NO: 16 |
| AAV27.3 | 154 | US20030138772 SEQ ID NO: 104 |
| AAVcy.4 (AAV27.3) | 155 | US20030138772 SEQ ID NO: 17 |
| AAVcy.5 | 156 | US20150315612 SEQ ID NO: 227 |
| AAV7.2 | 157 | US20030138772 SEQ ID NO: 103 |
| AAVcy.5 (AAV7.2) | 158 | US20030138772 SEQ ID NO: 18 |
| AAV16.3 | 159 | US20030138772 SEQ ID NO: 105 |
| AAVcy.6 (AAV16.3) | 160 | US20030138772 SEQ ID NO: 10 |
| AAVcy.5 | 161 | US20150159173 SEQ ID NO: 8 |
| AAVcy.5 | 162 | US20150159173 SEQ ID NO: 24 |
| AAVCy.5R1 | 163 | US20150159173 |
| AAVCy.5R2 | 164 | US20150159173 |
| AAVCy.5R3 | 165 | US20150159173 |
| AAVCy.5R4 | 166 | US20150159173 |
| AAVDJ | 167 | US20140359799 SEQ ID NO: 3, |
| | | U.S. Pat. No. 7,588,772 SEQ ID NO: 2 |
| AAVDJ | 168 | US20140359799 SEQ ID NO: 2, |
| | | U.S. Pat. No. 7,588,772 SEQ ID NO: 1 |
| AAVDJ-8 | 169 | U.S. Pat. No. 7,588,772; Grimm et al 2008 |
| AAVDJ-8 | 170 | U.S. Pat. No. 7,588,772; Grimm et al 2008 |
| AAVF5 | 171 | US20030138772 SEQ ID NO: 110 |
| AAVH2 | 172 | US20030138772 SEQ ID NO: 26 |
| AAVH6 | 173 | US20030138772 SEQ ID NO: 25 |
| AAVhE1.1 | 174 | U.S. Pat. No. 9,233,131 SEQ ID NO: 44 |
| AAVhEr1.14 | 175 | U.S. Pat. No. 9,233,131 SEQ ID NO: 46 |
| AAVhEr1.16 | 176 | U.S. Pat. No. 9,233,131 SEQ ID NO: 48 |
| AAVhEr1.18 | 177 | U.S. Pat. No. 9,233,131 SEQ ID NO: 49 |
| AAVhEr1.23 (AAVhEr2.29) | 178 | U.S. Pat. No. 9,233,131 SEQ ID NO: 53 |
| AAVhEr1.35 | 179 | U.S. Pat. No. 9,233,131 SEQ ID NO: 50 |
| AAVhEr1.36 | 180 | U.S. Pat. No. 9,233,131 SEQ ID NO: 52 |
| AAVhEr1.5 | 181 | U.S. Pat. No. 9,233,131 SEQ ID NO: 45 |
| AAVhEr1.7 | 182 | U.S. Pat. No. 9,233,131 SEQ ID NO: 51 |
| AAVhEr1.8 | 183 | U.S. Pat. No. 9,233,131 SEQ ID NO: 47 |
| AAVhEr2.16 | 184 | U.S. Pat. No. 9,233,131 SEQ ID NO: 55 |
| AAVhEr2.30 | 185 | U.S. Pat. No. 9,233,131 SEQ ID NO: 56 |
| AAVhEr2.31 | 186 | U.S. Pat. No. 9,233,131 SEQ ID NO: 58 |
| AAVhEr2.36 | 187 | U.S. Pat. No. 9,233,131 SEQ ID NO: 57 |
| AAVhEr2.4 | 188 | U.S. Pat. No. 9,233,131 SEQ ID NO: 54 |
| AAVhEr3.1 | 189 | U.S. Pat. No. 9,233,131 SEQ ID NO: 59 |
| AAVhu.1 | 190 | US20150315612 SEQ ID NO: 46 |
| AAVhu.1 | 191 | US20150315612 SEQ ID NO: 144 |
| AAVhu.10 (AAV16.8) | 192 | US20150315612 SEQ ID NO: 56 |
| AAVhu.10 (AAV16.8) | 193 | US20150315612 SEQ ID NO: 156 |
| AAVhu.11 (AAV16.12) | 194 | US20150315612 SEQ ID NO: 57 |
| AAVhu.11 (AAV16.12) | 195 | US20150315612 SEQ ID NO: 153 |
| AAVhu.12 | 196 | US20150315612 SEQ ID NO: 59 |
| AAVhu.12 | 197 | US20150315612 SEQ ID NO: 154 |
| AAVhu.13 | 198 | US20150159173 SEQ ID NO: 16, |
| | | US20150315612 SEQ ID NO: 71 |
| AAVhu.13 | 199 | US20150159173 SEQ ID NO: 32, |
| | | US20150315612 SEQ ID NO: 129 |
| AAVhu.136.1 | 200 | US20150315612 SEQ ID NO: 165 |
| AAVhu.140.1 | 201 | US20150315612 SEQ ID NO: 166 |
| AAVhu.140.2 | 202 | US20150315612 SEQ ID NO: 167 |
| AAVhu.145.6 | 203 | US20150315612 SEQ ID No: 178 |
| AAVhu.15 | 204 | US20150315612 SEQ ID NO: 147 |
| AAVhu.15 (AAV33.4) | 205 | US20150315612 SEQ ID NO: 50 |
| AAVhu.156.1 | 206 | US20150315612 SEQ ID No: 179 |
| AAVhu.16 | 207 | US20150315612 SEQ ID NO: 148 |
| AAVhu.16 (AAV33.8) | 208 | US20150315612 SEQ ID NO: 51 |
| AAVhu.17 | 209 | US20150315612 SEQ ID NO: 83 |
| AAVhu.17 (AAV33.12) | 210 | US20150315612 SEQ ID NO: 4 |
| AAVhu.172.1 | 211 | US20150315612 SEQ ID NO: 171 |
| AAVhu.172.2 | 212 | US20150315612 SEQ ID NO: 172 |
| AAVhu.173.4 | 213 | US20150315612 SEQ ID NO: 173 |
| AAVhu.173.8 | 214 | US20150315612 SEQ ID NO: 175 |
| AAVhu.18 | 215 | US20150315612 SEQ ID NO: 52 |
| AAVhu.18 | 216 | US20150315612 SEQ ID NO: 149 |
| AAVhu.19 | 217 | US20150315612 SEQ ID NO: 62 |
| AAVhu.19 | 218 | US20150315612 SEQ ID NO: 133 |
| AAVhu.2 | 219 | US20150315612 SEQ ID NO: 48 |
| AAVhu.2 | 220 | US20150315612 SEQ ID NO: 143 |
| AAVhu.20 | 221 | US20150315612 SEQ ID NO: 63 |
| AAVhu.20 | 222 | US20150315612 SEQ ID NO: 134 |
| AAVhu.21 | 223 | US20150315612 SEQ ID NO: 65 |
| AAVhu.21 | 224 | US20150315612 SEQ ID NO: 135 |
| AAVhu.22 | 225 | US20150315612 SEQ ID NO: 67 |
| AAVhu.22 | 226 | US20150315612 SEQ ID NO: 138 |
| AAVhu.23 | 227 | US20150315612 SEQ ID NO: 60 |
| AAVhu.23.2 | 228 | US20150315612 SEQ ID NO: 137 |
| AAVhu.24 | 229 | US20150315612 SEQ ID NO: 66 |
| AAVhu.24 | 230 | US20150315612 SEQ ID NO: 136 |
| AAVhu.25 | 231 | US20150315612 SEQ ID NO: 49 |
| AAVhu.25 | 232 | US20150315612 SEQ ID NO: 146 |
| AAVhu.26 | 233 | US20150159173 SEQ ID NO: 17, |
| | | US20150315612 SEQ ID NO: 61 |
| AAVhu.26 | 234 | US20150159173 SEQ ID NO: 33, |
| | | US20150315612 SEQ ID NO: 139 |
| AAVhu.27 | 235 | US20150315612 SEQ ID NO: 64 |
| AAVhu.27 | 236 | US20150315612 SEQ ID NO: 140 |
| AAVhu.28 | 237 | US20150315612 SEQ ID NO: 68 |
| AAVhu.28 | 238 | US20150315612 SEQ ID NO: 130 |
| AAVhu.29 | 239 | US20150315612 SEQ ID NO: 69 |
| AAVhu.29 | 240 | US20150159173 SEQ ID NO: 42, |
| | | US20150315612 SEQ ID NO: 132 |
| AAVhu.29 | 241 | US20150315612 SEQ ID NO: 225 |
| AAVhu.29R | 242 | US20150159173 |
| AAVhu.3 | 243 | US20150315612 SEQ ID NO: 44 |
| AAVhu.3 | 244 | US20150315612 SEQ ID NO: 145 |
| AAVhu.30 | 245 | US20150315612 SEQ ID NO: 70 |
| AAVhu.30 | 246 | US20150315612 SEQ ID NO: 131 |
| AAVhu.31 | 247 | US20150315612 SEQ ID NO: 1 |
| AAVhu.31 | 248 | US20150315612 SEQ ID NO: 121 |
| AAVhu.32 | 249 | US20150315612 SEQ ID NO: 2 |
| AAVhu.32 | 250 | US20150315612 SEQ ID NO: 122 |
| AAVhu.33 | 251 | US20150315612 SEQ ID NO: 75 |
| AAVhu.33 | 252 | US20150315612 SEQ ID NO: 124 |
| AAVhu.34 | 253 | US20150315612 SEQ ID NO: 72 |
| AAVhu.34 | 254 | US20150315612 SEQ ID NO: 125 |
| AAVhu.35 | 255 | US20150315612 SEQ ID NO: 73 |
| AAVhu.35 | 256 | US20150315612 SEQ ID NO: 164 |
| AAVhu.36 | 257 | US20150315612 SEQ ID NO: 74 |
| AAVhu.36 | 258 | US20150315612 SEQ ID NO: 126 |
| AAVhu.37 | 259 | US20150159173 SEQ ID NO: 34, |
| | | US20150315612 SEQ ID NO: 88 |
| AAVhu.37 (AAV106.1) | 260 | US20150315612 SEQ ID NO: 10, |
| | | US20150159173 SEQ ID NO: 18 |
| AAVhu.38 | 261 | US20150315612 SEQ ID NO: 161 |
| AAVhu.39 | 262 | US20150315612 SEQ ID NO: 102 |
| AAVhu.39 (AAVLG-9) | 263 | US20150315612 SEQ ID NO: 24 |
| AAVhu.4 | 264 | US20150315612 SEQ ID NO: 47 |
| AAVhu.4 | 265 | US20150315612 SEQ ID NO: 141 |
| AAVhu.40 | 266 | US20150315612 SEQ ID NO: 87 |
| AAVhu.40 (AAV114.3) | 267 | US20150315612 SEQ ID No: 11 |
| AAVhu.41 | 268 | US20150315612 SEQ ID NO: 91 |
| AAVhu.41 (AAV127.2) | 269 | US20150315612 SEQ ID NO: 6 |
| AAVhu.42 | 270 | US20150315612 SEQ ID NO: 85 |
| AAVhu.42 (AAV127.5) | 271 | US20150315612 SEQ ID NO: 8 |
| AAVhu.43 | 272 | US20150315612 SEQ ID NO: 160 |
| AAVhu.43 | 273 | US20150315612 SEQ ID NO: 236 |
| AAVhu.43 (AAV128.1) | 274 | US20150315612 SEQ ID NO: 80 |
| AAVhu.44 | 275 | US20150159173 SEQ ID NO: 45, |
| | | US20150315612 SEQ ID NO: 158 |
| AAVhu.44 (AAV128.3) | 276 | US20150315612 SEQ ID NO: 81 |
| AAVhu.44R1 | 277 | US20150159173 |
| AAVhu.44R2 | 278 | US20150159173 |
| AAVhu.44R3 | 279 | US20150159173 |
| AAVhu.45 | 280 | US20150315612 SEQ ID NO: 76 |
| AAVhu.45 | 281 | US20150315612 SEQ ID NO: 127 |
| AAVhu.46 | 282 | US20150315612 SEQ ID NO: 82 |
| AAVhu.46 | 283 | US20150315612 SEQ ID NO: 159 |
| AAVhu.46 | 284 | US20150315612 SEQ ID NO: 224 |
| AAVhu.47 | 285 | US20150315612 SEQ ID NO: 77 |
| AAVhu.47 | 286 | US20150315612 SEQ ID NO: 128 |
| AAVhu.48 | 287 | US20150159173 SEQ ID NO: 38 |
| AAVhu.48 | 288 | US20150315612 SEQ ID NO: 157 |
| AAVhu.48 (AAV130.4) | 289 | US20150315612 SEQ ID NO: 78 |
| AAVhu.48R1 | 290 | US20150159173 |
| AAVhu.48R2 | 291 | US20150159173 |
| AAVhu.48R3 | 292 | US20150159173 |
| AAVhu.49 | 293 | US20150315612 SEQ ID NO: 209 |
| AAVhu.49 | 294 | US20150315612 SEQ ID NO: 189 |
| AAVhu.5 | 295 | US20150315612 SEQ ID NO: 45 |
| AAVhu.5 | 296 | US20150315612 SEQ ID NO: 142 |
| AAVhu.51 | 297 | US20150315612 SEQ ID NO: 208 |
| AAVhu.51 | 298 | US20150315612 SEQ ID NO: 190 |
| AAVhu.52 | 299 | US20150315612 SEQ ID NO: 210 |
| AAVhu.52 | 300 | US20150315612 SEQ ID NO: 191 |
| AAVhu.53 | 301 | US20150159173 SEQ ID NO: 19 |
| AAVhu.53 | 302 | US20150159173 SEQ ID NO: 35 |
| AAVhu.53 (AAV145.1) | 303 | US20150315612 SEQ ID NO: 176 |
| AAVhu.54 | 304 | US20150315612 SEQ ID NO: 188 |
| AAVhu.54 (AAV145.5) | 305 | US20150315612 SEQ ID No: 177 |
| AAVhu.55 | 306 | US20150315612 SEQ ID NO: 187 |
| AAVhu.56 | 307 | US20150315612 SEQ ID NO: 205 |
| AAVhu.56 (AAV145.6) | 308 | US20150315612 SEQ ID NO: 168 |
| AAVhu.56 (AAV145.6) | 309 | US20150315612 SEQ ID NO: 192 |
| AAVhu.57 | 310 | US20150315612 SEQ ID NO: 206 |
| AAVhu.57 | 311 | US20150315612 SEQ ID NO: 169 |
| AAVhu.57 | 312 | US20150315612 SEQ ID NO: 193 |
| AAVhu.58 | 313 | US20150315612 SEQ ID NO: 207 |
| AAVhu.58 | 314 | US20150315612 SEQ ID NO: 194 |
| AAVhu.6 (AAV3.1) | 315 | US20150315612 SEQ ID NO: 5 |
| AAVhu.6 (AAV3.1) | 316 | US20150315612 SEQ ID NO: 84 |
| AAVhu.60 | 317 | US20150315612 SEQ ID NO: 184 |
| AAVhu.60 (AAV161.10) | 318 | US20150315612 SEQ ID NO: 170 |
| AAVhu.61 | 319 | US20150315612 SEQ ID NO: 185 |
| AAVhu.61 (AAV161.6) | 320 | US20150315612 SEQ ID NO: 174 |
| AAVhu.63 | 321 | US20150315612 SEQ ID NO: 204 |
| AAVhu.63 | 322 | US20150315612 SEQ ID NO: 195 |
| AAVhu.64 | 323 | US20150315612 SEQ ID NO: 212 |
| AAVhu.64 | 324 | US20150315612 SEQ ID NO: 196 |
| AAVhu.66 | 325 | US20150315612 SEQ ID NO: 197 |
| AAVhu.67 | 326 | US20150315612 SEQ ID NO: 215 |
| AAVhu.67 | 327 | US20150315612 SEQ ID NO: 198 |
| AAVhu.7 | 328 | US20150315612 SEQ ID NO: 226 |
| AAVhu.7 | 329 | US20150315612 SEQ ID NO: 150 |
| AAVhu.7 (AAV7.3) | 330 | US20150315612 SEQ ID NO: 55 |
| AAVhu.71 | 331 | US20150315612 SEQ ID NO: 79 |
| AAVhu.8 | 332 | US20150315612 SEQ ID NO: 53 |
| AAVhu.8 | 333 | US20150315612 SEQ ID NO: 12 |
| AAVhu.8 | 334 | US20150315612 SEQ ID NO: 151 |
| AAVhu.9 (AAV3.1) | 335 | US20150315612 SEQ ID NO: 58 |
| AAVhu.9 (AAV3.1) | 336 | US20150315612 SEQ ID NO: 155 |
| AAV-LK01 | 337 | US20150376607 SEQ ID NO: 2 |
| AAV-LK01 | 338 | US20150376607 SEQ ID NO: 29 |
| AAV-LK02 | 339 | US20150376607 SEQ ID NO: 3 |
| AAV-LK02 | 340 | US20150376607 SEQ ID NO: 30 |
| AAV-LK03 | 341 | US20150376607 SEQ ID NO: 4 |
| AAV-LK03 | 342 | WO2015121501 SEQ ID NO: 12, |
| | | US20150376607 SEQ ID NO: 31 |
| AAV-LK04 | 343 | US20150376607 SEQ ID NO: 5 |
| AAV-LK04 | 344 | US20150376607 SEQ ID NO: 32 |
| AAV-LK05 | 345 | US20150376607 SEQ ID NO: 6 |
| AAV-LK05 | 346 | US20150376607 SEQ ID NO: 33 |
| AAV-LK06 | 347 | US20150376607 SEQ ID NO: 7 |
| AAV-LK06 | 348 | US20150376607 SEQ ID NO: 34 |
| AAV-LK07 | 349 | US20150376607 SEQ ID NO: 8 |
| AAV-LK07 | 350 | US20150376607 SEQ ID NO: 35 |
| AAV-LK08 | 351 | US20150376607 SEQ ID NO: 9 |
| AAV-LK08 | 352 | US20150376607 SEQ ID NO: 36 |
| AAV-LK09 | 353 | US20150376607 SEQ ID NO: 10 |
| AAV-LK09 | 354 | US20150376607 SEQ ID NO: 37 |
| AAV-LK10 | 355 | US20150376607 SEQ ID NO: 11 |
| AAV-LK10 | 356 | US20150376607 SEQ ID NO: 38 |
| AAV-LK11 | 357 | US20150376607 SEQ ID NO: 12 |
| AAV-LK11 | 358 | US20150376607 SEQ ID NO: 39 |
| AAV-LK12 | 359 | US20150376607 SEQ ID NO: 13 |
| AAV-LK12 | 360 | US20150376607 SEQ ID NO: 40 |
| AAV-LK13 | 361 | US20150376607 SEQ ID NO: 14 |
| AAV-LK13 | 362 | US20150376607 SEQ ID NO: 41 |
| AAV-LK14 | 363 | US20150376607 SEQ ID NO: 15 |
| AAV-LK14 | 364 | US20150376607 SEQ ID NO: 42 |
| AAV-LK15 | 365 | US20150376607 SEQ ID NO: 16 |
| AAV-LK15 | 366 | US20150376607 SEQ ID NO: 43 |
| AAV-LK16 | 367 | US20150376607 SEQ ID NO: 17 |
| AAV-LK16 | 368 | US20150376607 SEQ ID NO: 44 |
| AAV-LK17 | 369 | US20150376607 SEQ ID NO: 18 |
| AAV-LK17 | 370 | US20150376607 SEQ ID NO: 45 |
| AAV-LK18 | 371 | US20150376607 SEQ ID NO: 19 |
| AAV-LK18 | 372 | US20150376607 SEQ ID NO: 46 |
| AAV-LK19 | 373 | US20150376607 SEQ ID NO: 20 |
| AAV-LK19 | 374 | US20150376607 SEQ ID NO: 47 |
| AAV-PAEC | 375 | US20150376607 SEQ ID NO: 1 |
| AAV-PAEC | 376 | US20150376607 SEQ ID NO: 48 |
| AAV-PAEC11 | 377 | US20150376607 SEQ ID NO: 26 |
| AAV-PAEC11 | 378 | US20150376607 SEQ ID NO: 54 |
| AAV-PAEC12 | 379 | US20150376607 SEQ ID NO: 27 |
| AAV-PAEC12 | 380 | US20150376607 SEQ ID NO: 51 |
| AAV-PAEC13 | 381 | US20150376607 SEQ ID NO: 28 |
| AAV-PAEC13 | 382 | US20150376607 SEQ ID NO: 49 |
| AAV-PAEC2 | 383 | US20150376607 SEQ ID NO: 21 |
| AAV-PAEC2 | 384 | US20150376607 SEQ ID NO: 56 |
| AAV-PAEC4 | 385 | US20150376607 SEQ ID NO: 22 |
| AAV-PAEC4 | 386 | US20150376607 SEQ ID NO: 55 |
| AAV-PAEC6 | 387 | US20150376607 SEQ ID NO: 23 |
| AAV-PAEC6 | 388 | US20150376607 SEQ ID NO: 52 |
| AAV-PAEC7 | 389 | US20150376607 SEQ ID NO: 24 |
| AAV-PAEC7 | 390 | US20150376607 SEQ ID NO: 53 |
| AAV-PAEC8 | 391 | US20150376607 SEQ ID NO: 25 |
| AAV-PAEC8 | 392 | US20150376607 SEQ ID NO: 50 |
| AAVpi.1 | 393 | US20150315612 SEQ ID NO: 28 |
| AAVpi.1 | 394 | US20150315612 SEQ ID NO: 93 |
| AAVpi.2 | 395 | US20150315612 SEQ ID NO: 30 |
| AAVpi.2 | 396 | US20150315612 SEQ ID NO: 95 |
| AAVpi.3 | 397 | US20150315612 SEQ ID NO: 29 |
| AAVpi.3 | 398 | US20150315612 SEQ ID NO: 94 |
| AAVrh.10 | 399 | US20150159173 SEQ ID NO: 9 |
| AAVrh.10 | 400 | US20150159173 SEQ ID NO: 25 |
| AAV44.2 | 401 | US20030138772 SEQ ID NO: 59 |
| AAVrh.10 (AAV44.2) | 402 | US20030138772 SEQ ID NO: 81 |
| AAV42.1B | 403 | US20030138772 SEQ ID NO: 90 |
| AAVrh.12 (AAV42.1b) | 404 | US20030138772 SEQ ID NO: 30 |
| AAVrh.13 | 405 | US20150159173 SEQ ID NO: 10 |
| AAVrh.13 | 406 | US20150159173 SEQ ID NO: 26 |
| AAVrh.13 | 407 | US20150315612 SEQ ID NO: 228 |
| AAVrh.13R | 408 | US20150159173 |
| AAV42.3A | 409 | US20030138772 SEQ ID NO: 87 |
| AAVrh.14 (AAV42.3a) | 410 | US20030138772 SEQ ID NO: 32 |
| AAV42.5A | 411 | US20030138772 SEQ ID NO: 89 |
| AAVrh.17 (AAV42.5a) | 412 | US20030138772 SEQ ID NO: 34 |
| AAV42.5B | 413 | US20030138772 SEQ ID NO: 91 |
| AAVrh.18 (AAV42.5b) | 414 | US20030138772 SEQ ID NO: 29 |
| AAV42.6B | 415 | US20030138772 SEQ ID NO: 112 |
| AAVrh.19 (AAV42.6b) | 416 | US20030138772 SEQ ID NO: 38 |
| AAVrh.2 | 417 | US20150159173 SEQ ID NO: 39 |
| AAVrh.2 | 418 | US20150315612 SEQ ID NO: 231 |
| AAVrh.20 | 419 | US20150159173 SEQ ID NO: 1 |
| AAV42.10 | 420 | US20030138772 SEQ ID NO: 106 |
| AAVrh.21 (AAV42.10) | 421 | US20030138772 SEQ ID NO: 35 |
| AAV42.11 | 422 | US20030138772 SEQ ID NO: 108 |
| AAVrh.22 (AAV42.11) | 423 | US20030138772 SEQ ID NO: 37 |
| AAV42.12 | 424 | US20030138772 SEQ ID NO: 113 |
| AAVrh.23 (AAV42.12) | 425 | US20030138772 SEQ ID NO: 58 |
| AAV42.13 | 426 | US20030138772 SEQ ID NO: 86 |
| AAVrh.24 (AAV42.13) | 427 | US20030138772 SEQ ID NO: 31 |
| AAV42.15 | 428 | US20030138772 SEQ ID NO: 84 |
| AAVrh.25 (AAV42.15) | 429 | US20030138772 SEQ ID NO: 28 |
| AAVrh.2R | 430 | US20150159173 |
| AAVrh.31 (AAV223.1) | 431 | US20030138772 SEQ ID NO: 48 |
| AAVC1 | 432 | US20030138772 SEQ ID NO: 60 |
| AAVrh.32 (AAVC1) | 433 | US20030138772 SEQ ID NO: 19 |
| AAVrh.32/33 | 434 | US20150159173 SEQ ID NO: 2 |
| AAVrh.33 (AAVC3) | 435 | US20030138772 SEQ ID NO: 20 |
| AAVC5 | 436 | US20030138772 SEQ ID NO: 62 |
| AAVrh.34 (AAVC5) | 437 | US20030138772 SEQ ID NO: 21 |
| AAVF1 | 438 | US20030138772 SEQ ID NO: 109 |
| AAVrh.35 (AAVF1) | 439 | US20030138772 SEQ ID NO: 22 |
| AAVF3 | 440 | US20030138772 SEQ ID NO: 111 |
| AAVrh.36 (AAVF3) | 441 | US20030138772 SEQ ID NO: 23 |
| AAVrh.37 | 442 | US20030138772 SEQ ID NO: 24 |
| AAVrh.37 | 443 | US20150159173 SEQ ID NO: 40 |
| AAVrh.37 | 444 | US20150315612 SEQ ID NO: 229 |
| AAVrh.37R2 | 445 | US20150159173 |
| AAVrh.38 (AAVLG-4) | 446 | US20150315612 SEQ ID NO: 7 |
| AAVrh.38 (AAVLG-4) | 447 | US20150315612 SEQ ID NO: 86 |
| AAVrh.39 | 448 | US20150159173 SEQ ID NO: 20, |
| | | US20150315612 SEQ ID NO: 13 |
| AAVrh.39 | 449 | US20150159173 SEQ ID NO: 3, |
| | | US20150159173 SEQ ID NO: 36, |
| | | US20150315612 SEQ ID NO: 89 |
| AAVrh.40 | 450 | US20150315612 SEQ ID NO: 92 |
| AAVrh.40 (AAVLG-10) | 451 | US20150315612 SEQ ID NO: 14 |
| AAVrh.43 (AAVN721-8) | 452 | US20150315612 SEQ ID NO: 43, |
| | | US20150159173 SEQ ID NO: 21 |
| AAVrh.43 (AAVN721-8) | 453 | US20150315612 SEQ ID NO: 163, |
| | | US20150159173 SEQ ID NO: 37 |
| AAVrh.44 | 454 | US20150315612 SEQ ID NO: 34 |
| AAVrh.44 | 455 | US20150315612 SEQ ID NO: 111 |
| AAVrh.45 | 456 | US20150315612 SEQ ID NO: 41 |
| AAVrh.45 | 457 | US20150315612 SEQ ID NO: 109 |
| AAVrh.46 | 458 | US20150159173 SEQ ID NO: 22, |
| | | US20150315612 SEQ ID NO: 19 |
| AAVrh.46 | 459 | US20150159173 SEQ ID NO: 4, |
| | | US20150315612 SEQ ID NO: 101 |
| AAVrh.47 | 460 | US20150315612 SEQ ID NO: 38 |
| AAVrh.47 | 461 | US20150315612 SEQ ID NO: 118 |
| AAVrh.48 | 462 | US20150159173 SEQ ID NO: 44, |
| | | US20150315612 SEQ ID NO: 115 |
| AAVrh.48.1 | 463 | US20150159173 |
| AAVrh.48.1.2 | 464 | US20150159173 |
| AAVrh.48.2 | 465 | US20150159173 |
| AAVrh.48 (AAV1-7) | 466 | US20150315612 SEQ ID NO: 32 |
| AAVrh.49 (AAV1-8) | 467 | US20150315612 SEQ ID NO: 25 |
| AAVrh.49 (AAV1-8) | 468 | US20150315612 SEQ ID NO: 103 |
| AAVrh.50 (AAV2-4) | 469 | US20150315612 SEQ ID NO: 23 |
| AAVrh.50 (AAV2-4) | 470 | US20150315612 SEQ ID NO: 108 |
| AAVrh.51 (AAV2-5) | 471 | US20150315612 SEQ ID No: 22 |
| AAVrh.51 (AAV2-5) | 472 | US20150315612 SEQ ID NO: 104 |
| AAVrh.52 (AAV3-9) | 473 | US20150315612 SEQ ID NO: 18 |
| AAVrh.52 (AAV3-9) | 474 | US20150315612 SEQ ID NO: 96 |
| AAVrh.53 | 475 | US20150315612 SEQ ID NO: 97 |
| AAVrh.53 (AAV3-11) | 476 | US20150315612 SEQ ID NO: 17 |
| AAVrh.53 (AAV3-11) | 477 | US20150315612 SEQ ID NO: 186 |
| AAVrh.54 | 478 | US20150315612 SEQ ID NO: 40 |
| AAVrh.54 | 479 | US20150159173 SEQ ID NO: 49, |
| | | US20150315612 SEQ ID NO: 116 |
| AAVrh.55 | 480 | US20150315612 SEQ ID NO: 37 |
| AAVrh.55 (AAV4-19) | 481 | US20150315612 SEQ ID NO: 117 |
| AAVrh.56 | 482 | US20150315612 SEQ ID NO: 54 |
| AAVrh.56 | 483 | US20150315612 SEQ ID NO: 152 |
| AAVrh.57 | 484 | US20150315612 SEQ ID NO: 26 |
| AAVrh.57 | 485 | US20150315612 SEQ ID NO: 105 |
| AAVrh.58 | 486 | US20150315612 SEQ ID NO: 27 |
| AAVrh.58 | 487 | US20150159173 SEQ ID NO: 48, |
| | | US20150315612 SEQ ID NO: 106 |
| AAVrh.58 | 488 | US20150315612 SEQ ID NO: 232 |
| AAVrh.59 | 489 | US20150315612 SEQ ID NO: 42 |
| AAVrh.59 | 490 | US20150315612 SEQ ID NO: 110 |
| AAVrh.60 | 491 | US20150315612 SEQ ID NO: 31 |
| AAVrh.60 | 492 | US20150315612 SEQ ID NO: 120 |
| AAVrh.61 | 493 | US20150315612 SEQ ID NO: 107 |
| AAVrh.61 (AAV2-3) | 494 | US20150315612 SEQ ID NO: 21 |
| AAVrh.62 (AAV2-15) | 495 | US20150315612 SEQ ID No: 33 |
| AAVrh.62 (AAV2-15) | 496 | US20150315612 SEQ ID NO: 114 |
| AAVrh.64 | 497 | US20150315612 SEQ ID No: 15 |
| AAVrh.64 | 498 | US20150159173 SEQ ID NO: 43, |
| | | US20150315612 SEQ ID NO: 99 |
| AAVrh.64 | 499 | US20150315612 SEQ ID NO: 233 |
| AAVRh.64R1 | 500 | US20150159173 |
| AAVRh.64R2 | 501 | US20150159173 |
| AAVrh.65 | 502 | US20150315612 SEQ ID NO: 35 |
| AAVrh.65 | 503 | US20150315612 SEQ ID NO: 112 |
| AAVrh.67 | 504 | US20150315612 SEQ ID NO: 36 |
| AAVrh.67 | 505 | US20150315612 SEQ ID NO: 230 |
| AAVrh.67 | 506 | US20150159173 SEQ ID NO: 47, |
| | | US20150315612 SEQ ID NO: 113 |
| AAVrh.68 | 507 | US20150315612 SEQ ID NO: 16 |
| AAVrh.68 | 508 | US20150315612 SEQ ID NO: 100 |
| AAVrh.69 | 509 | US20150315612 SEQ ID NO: 39 |
| AAVrh.69 | 510 | US20150315612 SEQ ID NO: 119 |
| AAVrh.70 | 511 | US20150315612 SEQ ID NO: 20 |
| AAVrh.70 | 512 | US20150315612 SEQ ID NO: 98 |
| AAVrh.71 | 513 | US20150315612 SEQ ID NO: 162 |
| AAVrh.72 | 514 | US20150315612 SEQ ID NO: 9 |
| AAVrh.73 | 515 | US20150159173 SEQ ID NO: 5 |
| AAVrh.74 | 516 | US20150159173 SEQ ID NO: 6 |
| AAVrh.8 | 517 | US20150159173 SEQ ID NO: 41 |
| AAVrh.8 | 518 | US20150315612 SEQ ID NO: 235 |
| AAVrh.8R | 519 | US20150159173, WO2015168666 SEQ ID NO: 9 |
| AAVrh.8R A586R mutant | 520 | WO2015168666 SEQ ID NO: 10 |
| AAVrh.8R R533A mutant | 521 | WO2015168666 SEQ ID NO: 11 |
| BAAV (bovine AAV) | 522 | U.S. Pat. No. 9,193,769 SEQ ID NO: 8 |
| BAAV (bovine AAV) | 523 | U.S. Pat. No. 9,193,769 SEQ ID NO: 10 |
| BAAV (bovine AAV) | 524 | U.S. Pat. No. 9,193,769 SEQ ID NO: 4 |
| BAAV (bovine AAV) | 525 | U.S. Pat. No. 9,193,769 SEQ ID NO: 2 |
| BAAV (bovine AAV) | 526 | U.S. Pat. No. 9,193,769 SEQ ID NO: 6 |
| BAAV (bovine AAV) | 527 | U.S. Pat. No. 9,193,769 SEQ ID NO: 1 |
| BAAV (bovine AAV) | 528 | U.S. Pat. No. 9,193,769 SEQ ID NO: 5 |
| BAAV (bovine AAV) | 529 | U.S. Pat. No. 9,193,769 SEQ ID NO: 3 |
| BAAV (bovine AAV) | 530 | U.S. Pat. No. 9,193,769 SEQ ID NO: 11 |
| BAAV (bovine AAV) | 531 | U.S. Pat. No. 7,427,396 SEQ ID NO: 5 |
| BAAV (bovine AAV) | 532 | U.S. Pat. No. 7,427,396 SEQ ID NO: 6 |
| BAAV (bovine AAV) | 533 | U.S. Pat. No. 9,193,769 SEQ ID NO: 7 |
| BAAV (bovine AAV) | 534 | U.S. Pat. No. 9,193,769 SEQ ID NO: 9 |
| BNP61 AAV | 535 | US20150238550 SEQ ID NO: 1 |
| BNP61 AAV | 536 | US20150238550 SEQ ID NO: 2 |
| BNP62 AAV | 537 | US20150238550 SEQ ID NO: 3 |
| BNP63 AAV | 538 | US20150238550 SEQ ID NO: 4 |
| caprine AAV | 539 | U.S. Pat. No. 7,427,396 SEQ ID NO: 3 |
| caprine AAV | 540 | U.S. Pat. No. 7,427,396 SEQ ID NO: 4 |
| true type AAV (ttAAV) | 541 | WO2015121501 SEQ ID NO: 2 |
| AAAV (Avian AAV) | 542 | U.S. Pat. No. 9,238,800 SEQ ID NO: 12 |
| AAAV (Avian AAV) | 543 | U.S. Pat. No. 9,238,800 SEQ ID NO: 2 |
| AAAV (Avian AAV) | 544 | U.S. Pat. No. 9,238,800 SEQ ID NO: 6 |
| AAAV (Avian AAV) | 545 | U.S. Pat. No. 9,238,800 SEQ ID NO: 4 |
| AAAV (Avian AAV) | 546 | U.S. Pat. No. 9,238,800 SEQ ID NO: 8 |
| AAAV (Avian AAV) | 547 | U.S. Pat. No. 9,238,800 SEQ ID NO: 14 |
| AAAV (Avian AAV) | 548 | U.S. Pat. No. 9,238,800 SEQ ID NO: 10 |
| AAAV (Avian AAV) | 549 | U.S. Pat. No. 9,238,800 SEQ ID NO: 15 |
| AAAV (Avian AAV) | 550 | U.S. Pat. No. 9,238,800 SEQ ID NO: 5 |
| AAAV (Avian AAV) | 551 | U.S. Pat. No. 9,238,800 SEQ ID NO: 9 |
| AAAV (Avian AAV) | 552 | U.S. Pat. No. 9,238,800 SEQ ID NO: 3 |
| AAAV (Avian AAV) | 553 | U.S. Pat. No. 9,238,800 SEQ ID NO: 7 |
| AAAV (Avian AAV) | 554 | U.S. Pat. No. 9,238,800 SEQ ID NO: 11 |
| AAAV (Avian AAV) | 555 | U.S. Pat. No. 9,238,800 SEQ ID NO: 13 |
| AAAV (Avian AAV) | 556 | U.S. Pat. No. 9,238,800 SEQ ID NO: 1 |
| AAV Shuffle 100-1 | 557 | US20160017295 SEQ ID NO: 23 |
| AAV Shuffle 100-1 | 558 | US20160017295 SEQ ID NO: 11 |
| AAV Shuffle 100-2 | 559 | US20160017295 SEQ ID NO: 37 |
| AAV Shuffle 100-2 | 560 | US20160017295 SEQ ID NO: 29 |
| AAV Shuffle 100-3 | 561 | US20160017295 SEQ ID NO: 24 |
| AAV Shuffle 100-3 | 562 | US20160017295 SEQ ID NO: 12 |
| AAV Shuffle 100-7 | 563 | US20160017295 SEQ ID NO: 25 |
| AAV Shuffle 100-7 | 564 | US20160017295 SEQ ID NO: 13 |
| AAV Shuffle 10-2 | 565 | US20160017295 SEQ ID NO: 34 |
| AAV Shuffle 10-2 | 566 | US20160017295 SEQ ID NO: 26 |
| AAV Shuffle 10-6 | 567 | US20160017295 SEQ ID NO: 35 |
| AAV Shuffle 10-6 | 568 | US20160017295 SEQ ID NO: 27 |
| AAV Shuffle 10-8 | 569 | US20160017295 SEQ ID NO: 36 |
| AAV Shuffle 10-8 | 570 | US20160017295 SEQ ID NO: 28 |
| AAV SM 100-10 | 571 | US20160017295 SEQ ID NO: 41 |
| AAV SM 100-10 | 572 | US20160017295 SEQ ID NO: 33 |
| AAV SM 100-3 | 573 | US20160017295 SEQ ID NO: 40 |
| AAV SM 100-3 | 574 | US20160017295 SEQ ID NO: 32 |
| AAV SM 10-1 | 575 | US20160017295 SEQ ID NO: 38 |
| AAV SM 10-1 | 576 | US20160017295 SEQ ID NO: 30 |
| AAV SM 10-2 | 577 | US20160017295 SEQ ID NO: 10 |
| AAV SM 10-2 | 578 | US20160017295 SEQ ID NO: 22 |
| AAV SM 10-8 | 579 | US20160017295 SEQ ID NO: 39 |
| AAV SM 10-8 | 580 | US20160017295 SEQ ID NO: 31 |
| AAVF1/HSC1 | 581 | WO2016049230 SEQ ID NO: 20 |
| AAVF2/HSC2 | 582 | WO2016049230 SEQ ID NO: 21 |
| AAVF3/HSC3 | 583 | WO2016049230 SEQ ID NO: 22 |
| AAVF4/HSC4 | 584 | WO2016049230 SEQ ID NO: 23 |
| AAVF5/HSC5 | 585 | WO2016049230 SEQ ID NO: 25 |
| AAVF6/HSC6 | 586 | WO2016049230 SEQ ID NO: 24 |
| AAVF7/HSC7 | 587 | WO2016049230 SEQ ID NO: 27 |
| AAVF8/HSC8 | 588 | WO2016049230 SEQ ID NO: 28 |
| AAVF9/HSC9 | 589 | WO2016049230 SEQ ID NO: 29 |
| AAVF11/HSC11 | 590 | WO2016049230 SEQ ID NO: 26 |
| AAVF12/HSC12 | 591 | WO2016049230 SEQ ID NO: 30 |
| AAVF13/HSC13 | 592 | WO2016049230 SEQ ID NO: 31 |
| AAVF14/HSC14 | 593 | WO2016049230 SEQ ID NO: 32 |
| AAVF15/HSC15 | 594 | WO2016049230 SEQ ID NO: 33 |
| AAVF16/HSC16 | 595 | WO2016049230 SEQ ID NO: 34 |
| AAVF17/HSC17 | 596 | WO2016049230 SEQ ID NO: 35 |
| AAVF1/HSC1 | 597 | WO2016049230 SEQ ID NO: 2 |
| AAVF2/HSC2 | 598 | WO2016049230 SEQ ID NO: 3 |
| AAVF3/HSC3 | 599 | WO2016049230 SEQ ID NO: 5 |
| AAVF4/HSC4 | 600 | WO2016049230 SEQ ID NO: 6 |
| AAVF5/HSC5 | 601 | WO2016049230 SEQ ID NO: 11 |
| AAVF6/HSC6 | 602 | WO2016049230 SEQ ID NO: 7 |
| AAVF7/HSC7 | 603 | WO2016049230 SEQ ID NO: 8 |
| AAVF8/HSC8 | 604 | WO2016049230 SEQ ID NO: 9 |
| AAVF9/HSC9 | 605 | WO2016049230 SEQ ID NO: 10 |
| AAVF11/HSC11 | 606 | WO2016049230 SEQ ID NO: 4 |
| AAVF12/HSC12 | 607 | WO2016049230 SEQ ID NO: 12 |
| AAVF13/HSC13 | 608 | WO2016049230 SEQ ID NO: 14 |
| AAVF14/HSC14 | 609 | WO2016049230 SEQ ID NO: 15 |
| AAVF15/HSC15 | 610 | WO2016049230 SEQ ID NO: 16 |
| AAVF16/HSC16 | 611 | WO2016049230 SEQ ID NO: 17 |
| AAVF17/HSC17 | 612 | WO2016049230 SEQ ID NO: 13 |
| AAV CBr-E1 | 613 | U.S. Pat. No. 8,734,809 SEQ ID NO: 13 |
| AAV CBr-E2 | 614 | U.S. Pat. No. 8,734,809 SEQ ID NO: 14 |
| AAV CBr-E3 | 615 | U.S. Pat. No. 8,734,809 SEQ ID NO: 15 |
| AAV CBr-E4 | 616 | U.S. Pat. No. 8,734,809 SEQ ID NO: 16 |
| AAV CBr-E5 | 617 | U.S. Pat. No. 8,734,809 SEQ ID NO: 17 |
| AAV CBr-e5 | 618 | U.S. Pat. No. 8,734,809 SEQ ID NO: 18 |
| AAV CBr-E6 | 619 | U.S. Pat. No. 8,734,809 SEQ ID NO: 19 |
| AAV CBr-E7 | 620 | U.S. Pat. No. 8,734,809 SEQ ID NO: 20 |
| AAV CBr-E8 | 621 | U.S. Pat. No. 8,734,809 SEQ ID NO: 21 |
| AAV CLv-D1 | 622 | U.S. Pat. No. 8,734,809 SEQ ID NO: 22 |
| AAV CLv-D2 | 623 | U.S. Pat. No. 8,734,809 SEQ ID NO: 23 |
| AAV CLv-D3 | 624 | U.S. Pat. No. 8,734,809 SEQ ID NO: 24 |
| AAV CLv-D4 | 625 | U.S. Pat. No. 8,734,809 SEQ ID NO: 25 |
| AAV CLv-D5 | 626 | U.S. Pat. No. 8,734,809 SEQ ID NO: 26 |
| AAV CLv-D6 | 627 | U.S. Pat. No. 8,734,809 SEQ ID NO: 27 |
| AAV CLv-D7 | 628 | U.S. Pat. No. 8,734,809 SEQ ID NO: 28 |
| AAV CLv-D8 | 629 | U.S. Pat. No. 8,734,809 SEQ ID NO: 29 |
| AAV CLv-E1 | 630 | U.S. Pat. No. 8,734,809 SEQ ID NO: 13 |
| AAV CLv-R1 | 631 | U.S. Pat. No. 8,734,809 SEQ ID NO: 30 |
| AAV CLv-R2 | 632 | U.S. Pat. No. 8,734,809 SEQ ID NO: 31 |
| AAV CLv-R3 | 633 | U.S. Pat. No. 8,734,809 SEQ ID NO: 32 |
| AAV CLv-R4 | 634 | U.S. Pat. No. 8,734,809 SEQ ID NO: 33 |
| AAV CLv-R5 | 635 | U.S. Pat. No. 8,734,809 SEQ ID NO: 34 |
| AAV CLv-R6 | 636 | U.S. Pat. No. 8,734,809 SEQ ID NO: 35 |
| AAV CLv-R7 | 637 | U.S. Pat. No. 8,734,809 SEQ ID NO: 36 |
| AAV CLv-R8 | 638 | U.S. Pat. No. 8,734,809 SEQ ID NO: 37 |
| AAV CLv-R9 | 639 | U.S. Pat. No. 8,734,809 SEQ ID NO: 38 |
| AAV CLg-F1 | 640 | U.S. Pat. No. 8,734,809 SEQ ID NO: 39 |
| AAV CLg-F2 | 641 | U.S. Pat. No. 8,734,809 SEQ ID NO: 40 |
| AAV CLg-F3 | 642 | U.S. Pat. No. 8,734,809 SEQ ID NO: 41 |
| AAV CLg-F4 | 643 | U.S. Pat. No. 8,734,809 SEQ ID NO: 42 |
| AAV CLg-F5 | 644 | U.S. Pat. No. 8,734,809 SEQ ID NO: 43 |
| AAV CLg-F6 | 645 | U.S. Pat. No. 8,734,809 SEQ ID NO: 43 |
| AAV CLg-F7 | 646 | U.S. Pat. No. 8,734,809 SEQ ID NO: 44 |
| AAV CLg-F8 | 647 | U.S. Pat. No. 8,734,809 SEQ ID NO: 43 |
| AAV CSp-1 | 648 | U.S. Pat. No. 8,734,809 SEQ ID NO: 45 |
| AAV CSp-10 | 649 | U.S. Pat. No. 8,734,809 SEQ ID NO: 46 |
| AAV CSp-11 | 650 | U.S. Pat. No. 8,734,809 SEQ ID NO: 47 |
| AAV CSp-2 | 651 | U.S. Pat. No. 8,734,809 SEQ ID NO: 48 |
| AAV CSp-3 | 652 | U.S. Pat. No. 8,734,809 SEQ ID NO: 49 |
| AAV CSp-4 | 653 | U.S. Pat. No. 8,734,809 SEQ ID NO: 50 |
| AAV CSp-6 | 654 | U.S. Pat. No. 8,734,809 SEQ ID NO: 51 |
| AAV CSp-7 | 655 | U.S. Pat. No. 8,734,809 SEQ ID NO: 52 |
| AAV CSp-8 | 656 | U.S. Pat. No. 8,734,809 SEQ ID NO: 53 |
| AAV CSp-9 | 657 | U.S. Pat. No. 8,734,809 SEQ ID NO: 54 |
| AAV CHt-2 | 658 | U.S. Pat. No. 8,734,809 SEQ ID NO: 55 |
| AAV CHt-3 | 659 | U.S. Pat. No. 8,734,809 SEQ ID NO: 56 |
| AAV CKd-1 | 660 | U.S. Pat. No. 8,734,809 SEQ ID NO: 57 |
| AAV CKd-10 | 661 | U.S. Pat. No. 8,734,809 SEQ ID NO: 58 |
| AAV CKd-2 | 662 | U.S. Pat. No. 8,734,809 SEQ ID NO: 59 |
| AAV CKd-3 | 663 | U.S. Pat. No. 8,734,809 SEQ ID NO: 60 |
| AAV CKd-4 | 664 | U.S. Pat. No. 8,734,809 SEQ ID NO: 61 |
| AAV CKd-6 | 665 | U.S. Pat. No. 8,734,809 SEQ ID NO: 62 |
| AAVC Kd-7 | 666 | U.S. Pat. No. 8,734,809 SEQ ID NO: 63 |
| AAVC Kd-8 | 667 | U.S. Pat. No. 8,734,809 SEQ ID NO: 64 |
| AAV CLv-1 | 668 | U.S. Pat. No. 8,734,809 SEQ ID NO: 65 |
| AAV CLv-12 | 669 | U.S. Pat. No. 8,734,809 SEQ ID NO: 66 |
| AAV CLv-13 | 670 | U.S. Pat. No. 8,734,809 SEQ ID NO: 67 |
| AAVC Lv-2 | 671 | U.S. Pat. No. 8,734,809 SEQ ID NO: 68 |
| AAVC Lv-3 | 672 | U.S. Pat. No. 8,734,809 SEQ ID NO: 69 |
| AAV CLv-4 | 673 | U.S. Pat. No. 8,734,809 SEQ ID NO: 70 |
| AAVC Lv-6 | 674 | U.S. Pat. No. 8,734,809 SEQ ID NO: 71 |
| AAVC Lv-8 | 675 | U.S. Pat. No. 8,734,809 SEQ ID NO: 72 |
| AAVC Kd-B1 | 676 | U.S. Pat. No. 8,734,809 SEQ ID NO: 73 |
| AAV CKd-B2 | 677 | U.S. Pat. No. 8,734,809 SEQ ID NO: 74 |
| AAV CKd-B3 | 678 | U.S. Pat. No. 8,734,809 SEQ ID NO: 75 |
| AAV CKd-B4 | 679 | U.S. Pat. No. 8,734,809 SEQ ID NO: 76 |
| AAVC Kd-B5 | 680 | U.S. Pat. No. 8,734,809 SEQ ID NO: 77 |
| AAV CKd-B6 | 681 | U.S. Pat. No. 8,734,809 SEQ ID NO: 78 |
| AAV CKd-B7 | 682 | U.S. Pat. No. 8,734,809 SEQ ID NO: 79 |
| AAV CKd-B8 | 683 | U.S. Pat. No. 8,734,809 SEQ ID NO: 80 |
| AAV CKd-H1 | 684 | U.S. Pat. No. 8,734,809 SEQ ID NO: 81 |
| AAV CKd-H2 | 685 | U.S. Pat. No. 8,734,809 SEQ ID NO: 82 |
| AAV CKd-H3 | 686 | U.S. Pat. No. 8,734,809 SEQ ID NO: 83 |
| AAV CKd-H4 | 687 | U.S. Pat. No. 8,734,809 SEQ ID NO: 84 |
| AAV CKd-H5 | 688 | U.S. Pat. No. 8,734,809 SEQ ID NO: 85 |
| AAV CKd-H6 | 689 | U.S. Pat. No. 8,734,809 SEQ ID NO: 77 |
| AAV CHt-1 | 690 | U.S. Pat. No. 8,734,809 SEQ ID NO: 86 |
| AAV CLv1-1 | 691 | U.S. Pat. No. 8,734,809 SEQ ID NO: 171 |
| AAV CLv1-2 | 692 | U.S. Pat. No. 8,734,809 SEQ ID NO: 172 |
| AAV CLv1-3 | 693 | U.S. Pat. No. 8,734,809 SEQ ID NO: 173 |
| AAV CLv1-4 | 694 | U.S. Pat. No. 8,734,809 SEQ ID NO: 174 |
| AAV CLv1-7 | 695 | U.S. Pat. No. 8,734,809 SEQ ID NO: 175 |
| AAV Clv1-8 | 696 | U.S. Pat. No. 8,734,809 SEQ ID NO: 176 |
| AAV Clv1-9 | 697 | U.S. Pat. No. 8,734,809 SEQ ID NO: 177 |
| AAV Clv1-10 | 698 | U.S. Pat. No. 8,734,809 SEQ ID NO: 178 |
| AAV.VR-355 | 699 | U.S. Pat. No. 8,734,809 SEQ ID NO: 181 |
| AAV.hu.48R3 | 700 | U.S. Pat. No. 8,734,809 SEQ ID NO: 183 |
| AAV CBr-E1 | 701 | U.S. Pat. No. 8,734,809 SEQ ID NO: 87 |
| AAV CBr-E2 | 702 | U.S. Pat. No. 8,734,809 SEQ ID NO: 88 |
| AAV CBr-E3 | 703 | U.S. Pat. No. 8,734,809 SEQ ID NO: 89 |
| AAV CBr-E4 | 704 | U.S. Pat. No. 8,734,809 SEQ ID NO: 90 |
| AAV CBr-E5 | 705 | U.S. Pat. No. 8,734,809 SEQ ID NO: 91 |
| AAV CBr-e5 | 706 | U.S. Pat. No. 8,734,809 SEQ ID NO: 92 |
| AAVC Br-E6 | 707 | U.S. Pat. No. 8,734,809 SEQ ID NO: 93 |
| AAVC Br-E7 | 708 | U.S. Pat. No. 8,734,809 SEQ ID NO: 94 |
| AAV CBr-E8 | 709 | U.S. Pat. No. 8,734,809 SEQ ID NO: 95 |
| AAV CLv-D1 | 710 | U.S. Pat. No. 8,734,809 SEQ ID NO: 96 |
| AAV CLv-D2 | 711 | U.S. Pat. No. 8,734,809 SEQ ID NO: 97 |
| AAV CLv-D3 | 712 | U.S. Pat. No. 8,734,809 SEQ ID NO: 98 |
| AAV CLv-D4 | 713 | U.S. Pat. No. 8,734,809 SEQ ID NO: 99 |
| AAV CLv-D5 | 714 | U.S. Pat. No. 8,734,809 SEQ ID NO: 100 |
| AAV CLv-D6 | 715 | U.S. Pat. No. 8,734,809 SEQ ID NO: 101 |
| AAV CLv-D7 | 716 | U.S. Pat. No. 8,734,809 SEQ ID NO: 102 |
| AAV CLv-D8 | 717 | U.S. Pat. No. 8,734,809 SEQ ID NO: 103 |
| AAV CLv-E1 | 718 | U.S. Pat. No. 8,734,809 SEQ ID NO: 87 |
| AAV CLv-R1 | 719 | U.S. Pat. No. 8,734,809 SEQ ID NO: 104 |
| AAV CLv-R2 | 720 | U.S. Pat. No. 8,734,809 SEQ ID NO: 105 |
| AAV CLv-R3 | 721 | U.S. Pat. No. 8,734,809 SEQ ID NO: 106 |
| AAV CLv-R4 | 722 | U.S. Pat. No. 8,734,809 SEQ ID NO: 107 |
| AAV CLv-R5 | 723 | U.S. Pat. No. 8,734,809 SEQ ID NO: 108 |
| AAV CLv-R6 | 724 | U.S. Pat. No. 8,734,809 SEQ ID NO: 109 |
| AAV CLv-R7 | 725 | U.S. Pat. No. 8,734,809 SEQ ID NO: 110 |
| AAV CLv-R8 | 726 | U.S. Pat. No. 8,734,809 SEQ ID NO: 111 |
| AAV CLv-R9 | 727 | U.S. Pat. No. 8,734,809 SEQ ID NO: 112 |
| AAV CLg-F1 | 728 | U.S. Pat. No. 8,734,809 SEQ ID NO: 113 |
| AAV CLg-F2 | 729 | U.S. Pat. No. 8,734,809 SEQ ID NO: 114 |
| AAV CLg-F3 | 730 | U.S. Pat. No. 8,734,809 SEQ ID NO: 115 |
| AAV CLg-F4 | 731 | U.S. Pat. No. 8,734,809 SEQ ID NO: 116 |
| AAV CLg-F5 | 732 | U.S. Pat. No. 8,734,809 SEQ ID NO: 117 |
| AAV CLg-F6 | 733 | U.S. Pat. No. 8,734,809 SEQ ID NO: 117 |
| AAV CLg-F7 | 734 | U.S. Pat. No. 8,734,809 SEQ ID NO: 118 |
| AAV CLg-F8 | 735 | U.S. Pat. No. 8,734,809 SEQ ID NO: 117 |
| AAV CSp-1 | 736 | U.S. Pat. No. 8,734,809 SEQ ID NO: 119 |
| AAV CSp-10 | 737 | U.S. Pat. No. 8,734,809 SEQ ID NO: 120 |
| AAV CSp-11 | 738 | U.S. Pat. No. 8,734,809 SEQ ID NO: 121 |
| AAV CSp-2 | 739 | U.S. Pat. No. 8,734,809 SEQ ID NO: 122 |
| AAV CSp-3 | 740 | U.S. Pat. No. 8,734,809 SEQ ID NO: 123 |
| AAV CSp-4 | 741 | U.S. Pat. No. 8,734,809 SEQ ID NO: 124 |
| AAV CSp-6 | 742 | U.S. Pat. No. 8,734,809 SEQ ID NO: 125 |
| AAV CSp-7 | 743 | U.S. Pat. No. 8,734,809 SEQ ID NO: 126 |
| AAV CSp-8 | 744 | U.S. Pat. No. 8,734,809 SEQ ID NO: 127 |
| AAV CSp-9 | 745 | U.S. Pat. No. 8,734,809 SEQ ID NO: 128 |
| AAV CHt-2 | 746 | U.S. Pat. No. 8,734,809 SEQ ID NO: 129 |
| AAV CHt-3 | 747 | U.S. Pat. No. 8,734,809 SEQ ID NO: 130 |
| AAV CKd-1 | 748 | U.S. Pat. No. 8,734,809 SEQ ID NO: 131 |
| AAV CKd-10 | 749 | U.S. Pat. No. 8,734,809 SEQ ID NO: 132 |
| AAV CKd-2 | 750 | U.S. Pat. No. 8,734,809 SEQ ID NO: 133 |
| AAV CKd-3 | 751 | U.S. Pat. No. 8,734,809 SEQ ID NO: 134 |
| AAV CKd-4 | 752 | U.S. Pat. No. 8,734,809 SEQ ID NO: 135 |
| AAV CKd-6 | 753 | U.S. Pat. No. 8,734,809 SEQ ID NO: 136 |
| AAV CKd-7 | 754 | U.S. Pat. No. 8,734,809 SEQ ID NO: 137 |
| AAV CKd-8 | 755 | U.S. Pat. No. 8,734,809 SEQ ID NO: 138 |
| AAV CLv-1 | 756 | U.S. Pat. No. 8,734,809 SEQ ID NO: 139 |
| AAV CLv-12 | 757 | U.S. Pat. No. 8,734,809 SEQ ID NO: 140 |
| AAV CLv-13 | 758 | U.S. Pat. No. 8,734,809 SEQ ID NO: 141 |
| AAV CLv-2 | 759 | U.S. Pat. No. 8,734,809 SEQ ID NO: 142 |
| AAV CLv-3 | 760 | U.S. Pat. No. 8,734,809 SEQ ID NO: 143 |
| AAV CLv-4 | 761 | U.S. Pat. No. 8,734,809 SEQ ID NO: 144 |
| AAV CLv-6 | 762 | U.S. Pat. No. 8,734,809 SEQ ID NO: 145 |
| AAV CLv-8 | 763 | U.S. Pat. No. 8,734,809 SEQ ID NO: 146 |
| AAV CKd-B1 | 764 | U.S. Pat. No. 8,734,809 SEQ ID NO: 147 |
| AAV CKd-B2 | 765 | U.S. Pat. No. 8,734,809 SEQ ID NO: 148 |
| AAV CKd-B3 | 766 | U.S. Pat. No. 8,734,809 SEQ ID NO: 149 |
| AAV CKd-B4 | 767 | U.S. Pat. No. 8,734,809 SEQ ID NO: 150 |
| AAV CKd-B5 | 768 | U.S. Pat. No. 8,734,809 SEQ ID NO: 151 |
| AAV CKd-B6 | 769 | U.S. Pat. No. 8,734,809 SEQ ID NO: 152 |
| AAV CKd-B7 | 770 | U.S. Pat. No. 8,734,809 SEQ ID NO: 153 |
| AAV CKd-B8 | 771 | U.S. Pat. No. 8,734,809 SEQ ID NO: 154 |
| AAV CKd-H1 | 772 | U.S. Pat. No. 8,734,809 SEQ ID NO: 155 |
| AAV CKd-H2 | 773 | U.S. Pat. No. 8,734,809 SEQ ID NO: 156 |
| AAV CKd-H3 | 774 | U.S. Pat. No. 8,734,809 SEQ ID NO: 157 |
| AAV CKd-H4 | 775 | U.S. Pat. No. 8,734,809 SEQ ID NO: 158 |
| AAV CKd-H5 | 776 | U.S. Pat. No. 8,734,809 SEQ ID NO: 159 |
| AAV CKd-H6 | 777 | U.S. Pat. No. 8,734,809 SEQ ID NO: 151 |
| AAV CHt-1 | 778 | U.S. Pat. No. 8,734,809 SEQ ID NO: 160 |
| AAV CHt-P2 | 779 | WO2016065001 SEQ ID NO: 1 |
| AAV CHt-P5 | 780 | WO2016065001 SEQ ID NO: 2 |
| AAV CHt-P9 | 781 | WO2016065001 SEQ ID NO: 3 |
| AAV CBr-7.1 | 782 | WO2016065001 SEQ ID NO: 4 |
| AAV CBr-7.2 | 783 | WO2016065001 SEQ ID NO: 5 |
| AAV CBr-7.3 | 784 | WO2016065001 SEQ ID NO: 6 |
| AAV CBr-7.4 | 785 | WO2016065001 SEQ ID NO: 7 |
| AAV CBr-7.5 | 786 | WO2016065001 SEQ ID NO: 8 |
| AAV CBr-7.7 | 787 | WO2016065001 SEQ ID NO: 9 |
| AAV CBr-7.8 | 788 | WO2016065001 SEQ ID NO: 10 |
| AAV CBr-7.10 | 789 | WO2016065001 SEQ ID NO: 11 |
| AAV CKd-N3 | 790 | WO2016065001 SEQ ID NO: 12 |
| AAV CKd-N4 | 791 | WO2016065001 SEQ ID NO: 13 |
| AAV CKd-N9 | 792 | WO2016065001 SEQ ID NO: 14 |
| AAV CLv-L4 | 793 | WO2016065001 SEQ ID NO: 15 |
| AAV CLv-L5 | 794 | WO2016065001 SEQ ID NO: 16 |
| AAV CLv-L6 | 795 | WO2016065001 SEQ ID NO: 17 |
| AAV CLv-K1 | 796 | WO2016065001 SEQ ID NO: 18 |
| AAV CLv-K3 | 797 | WO2016065001 SEQ ID NO: 19 |
| AAV CLv-K6 | 798 | WO2016065001 SEQ ID NO: 20 |
| AAV CLv-M1 | 799 | WO2016065001 SEQ ID NO: 21 |
| AAV CLv-M11 | 800 | WO2016065001 SEQ ID NO: 22 |
| AAV CLv-M2 | 801 | WO2016065001 SEQ ID NO: 23 |
| AAV CLv-M5 | 802 | WO2016065001 SEQ ID NO: 24 |
| AAV CLv-M6 | 803 | WO2016065001 SEQ ID NO: 25 |
| AAV CLv-M7 | 804 | WO2016065001 SEQ ID NO: 26 |
| AAV CLv-M8 | 805 | WO2016065001 SEQ ID NO: 27 |
| AAV CLv-M9 | 806 | WO2016065001 SEQ ID NO: 28 |
| AAV CHt-P1 | 807 | WO2016065001 SEQ ID NO: 29 |
| AAV CHt-P6 | 808 | WO2016065001 SEQ ID NO: 30 |
| AAV CHt-P8 | 809 | WO2016065001 SEQ ID NO: 31 |
| AAV CHt-6.1 | 810 | WO2016065001 SEQ ID NO: 32 |
| AAV CHt-6.10 | 811 | WO2016065001 SEQ ID NO: 33 |
| AAV CHt-6.5 | 812 | WO2016065001 SEQ ID NO: 34 |
| AAV CHt-6.6 | 813 | WO2016065001 SEQ ID NO: 35 |
| AAV CHt-6.7 | 814 | WO2016065001 SEQ ID NO: 36 |
| AAV CHt-6.8 | 815 | WO2016065001 SEQ ID NO: 37 |
| AAV CSp-8.10 | 816 | WO2016065001 SEQ ID NO: 38 |
| AAV CSp-8.2 | 817 | WO2016065001 SEQ ID NO: 39 |
| AAV CSp-8.4 | 818 | WO2016065001 SEQ ID NO: 40 |
| AAV CSp-8.5 | 819 | WO2016065001 SEQ ID NO: 41 |
| AAV CSp-8.6 | 820 | WO2016065001 SEQ ID NO: 42 |
| AAV CSp-8.7 | 821 | WO2016065001 SEQ ID NO: 43 |
| AAV CSp-8.8 | 822 | WO2016065001 SEQ ID NO: 44 |
| AAV CSp-8.9 | 823 | WO2016065001 SEQ ID NO: 45 |
| AAV CBr-B7.3 | 824 | WO2016065001 SEQ ID NO: 46 |
| AAV CBr-B7.4 | 825 | WO2016065001 SEQ ID NO: 47 |
| AAV3B | 826 | WO2016065001 SEQ ID NO: 48 |
| AAV4 | 827 | WO2016065001 SEQ ID NO: 49 |
| AAV5 | 828 | WO2016065001 SEQ ID NO: 50 |
| AAV CHt-P2 | 829 | WO2016065001 SEQ ID NO: 51 |
| AAV CHt-P5 | 830 | WO2016065001 SEQ ID NO: 52 |
| AAV CHt-P9 | 831 | WO2016065001 SEQ ID NO: 53 |
| AAV CBr-7.1 | 832 | WO2016065001 SEQ ID NO: 54 |
| AAV CBr-7.2 | 833 | WO2016065001 SEQ ID NO: 55 |
| AAV CBr-7.3 | 834 | WO2016065001 SEQ ID NO: 56 |
| AAV CBr-7.4 | 835 | WO2016065001 SEQ ID NO: 57 |
| AAV CBr-7.5 | 836 | WO2016065001 SEQ ID NO: 58 |
| AAV CBr-7.7 | 837 | WO2016065001 SEQ ID NO: 59 |
| AAV CBr-7.8 | 838 | WO2016065001 SEQ ID NO: 60 |
| AAV CBr-7.10 | 839 | WO2016065001 SEQ ID NO: 61 |
| AAV CKd-N3 | 840 | WO2016065001 SEQ ID NO: 62 |
| AAV CK4-N4 | 841 | WO2016065001 SEQ ID NO: 63 |
| AAV CKd-N9 | 842 | WO2016065001 SEQ ID NO: 64 |
| AAV CLv-L4 | 843 | WO2016065001 SEQ ID NO: 65 |
| AAV CLv-L5 | 844 | WO2016065001 SEQ ID NO: 66 |
| AAV CLv-L6 | 845 | WO2016065001 SEQ ID NO: 67 |
| AAV CLv-K1 | 846 | WO2016065001 SEQ ID NO: 68 |
| AAV CLv-K3 | 847 | WO2016065001 SEQ ID NO: 69 |
| AAV CLv-K6 | 848 | WO2016065001 SEQ ID NO: 70 |
| AAV CLv-M1 | 849 | WO2016065001 SEQ ID NO: 71 |
| AAV CLv-M11 | 850 | WO2016065001 SEQ ID NO: 72 |
| AAV CLv-M2 | 851 | WO2016065001 SEQ ID NO: 73 |
| AAV CLv-M5 | 852 | WO2016065001 SEQ ID NO: 74 |
| AAV CLv-M6 | 853 | WO2016065001 SEQ ID NO: 75 |
| AAV CLv-M7 | 854 | WO2016065001 SEQ ID NO: 76 |
| AAV CLv-M8 | 855 | WO2016065001 SEQ ID NO: 77 |
| AAV CLv-M9 | 856 | WO2016065001 SEQ ID NO: 78 |
| AAV CHt-P1 | 857 | WO2016065001 SEQ ID NO: 79 |
| AAV CHt-P6 | 858 | WO2016065001 SEQ ID NO: 80 |
| AAV CHt-P8 | 859 | WO2016065001 SEQ ID NO: 81 |
| AAV CHt-6.1 | 860 | WO2016065001 SEQ ID NO: 82 |
| AAV CHt-6.10 | 861 | WO2016065001 SEQ ID NO: 83 |
| AAV CHt-6.5 | 862 | WO2016065001 SEQ ID NO: 84 |
| AAV CHt-6.6 | 863 | WO2016065001 SEQ ID NO: 85 |
| AAV CHt-6.7 | 864 | WO2016065001 SEQ ID NO: 86 |
| AAV CHt-6.8 | 865 | WO2016065001 SEQ ID NO: 87 |
| AAV CSp-8.10 | 866 | WO2016065001 SEQ ID NO: 88 |
| AAV CSp-8.2 | 867 | WO2016065001 SEQ ID NO: 89 |
| AAV CSp-8.4 | 868 | WO2016065001 SEQ ID NO: 90 |
| AAV CSp-8.5 | 869 | WO2016065001 SEQ ID NO: 91 |
| AAV CSp-8.6 | 870 | WO2016065001 SEQ ID NO: 92 |
| AAV CSp-8.7 | 871 | WO2016065001 SEQ ID NO: 93 |
| AAV CSp-8.8 | 872 | WO2016065001 SEQ ID NO: 94 |
| AAV CSp-8.9 | 873 | WO2016065001 SEQ ID NO: 95 |
| AAV CBr-B7.3 | 874 | WO2016065001 SEQ ID NO: 96 |
| AAV CBr-B7.4 | 875 | WO2016065001 SEQ ID NO: 97 |
| AAV3B | 876 | WO2016065001 SEQ ID NO: 98 |
| AAV4 | 877 | WO2016065001 SEQ ID NO: 99 |
| AAV5 | 878 | WO2016065001 SEQ ID NO: 100 |
| GPV | 879 | U.S. Pat. No. 9,624,274B2 SEQ ID NO: 192 |
| B19 | 880 | U.S. Pat. No. 9,624,274B2 SEQ ID NO: 193 |
| MVM | 881 | U.S. Pat. No. 9,624,274B2 SEQ ID NO: 194 |
| FPV | 882 | U.S. Pat. No. 9,624,274B2 SEQ ID NO: 195 |
| CPV | 883 | U.S. Pat. No. 9,624,274B2 SEQ ID NO: 196 |
| AAV6 | 884 | U.S. Pat. No. 9,546,112B2 SEQ ID NO: 5 |
| AAV6 | 885 | U.S. Pat. No. 9,457,103B2 SEQ ID NO: 1 |
| AAV2 | 886 | U.S. Pat. No. 9,457,103B2 SEQ ID NO: 2 |
| ShH10 | 887 | U.S. Pat. No. 9,457,103B2 SEQ ID NO: 3 |
| ShH13 | 888 | U.S. Pat. No. 9,457,103B2 SEQ ID NO: 4 |
| ShH10 | 889 | U.S. Pat. No. 9,457,103B2 SEQ ID NO: 5 |
| ShH10 | 890 | U.S. Pat. No. 9,457,103B2 SEQ ID NO: 6 |
| ShH10 | 891 | U.S. Pat. No. 9,457,103B2 SEQ ID NO: 7 |
| ShH10 | 892 | U.S. Pat. No. 9,457,103B2 SEQ ID NO: 8 |
| ShH10 | 893 | U.S. Pat. No. 9,457,103B2 SEQ ID NO: 9 |
| rh74 | 894 | U.S. Pat. No. 9,434,928B2 SEQ ID NO: 1, |
| | | US2015023924A1 SEQ ID NO: 2 |
| rh74 | 895 | U.S. Pat. No. 9,434,928B2 SEQ ID NO: 2, |
| | | US2015023924A1 SEQ ID NO: 1 |
| AAV8 | 896 | U.S. Pat. No. 9,434,928B2 SEQ ID NO: 4 |
| rh74 | 897 | U.S. Pat. No. 9,434,928B2 SEQ ID NO: 5 |
| rh74 (RHM4-1) | 898 | US2015023924A1 SEQ ID NO: 5, |
| | | US20160375110A1 SEQ ID NO: 4 |
| rh74 (RHM15-1) | 899 | US2015023924A1 SEQ ID NO: 6, |
| | | US20160375110A1 SEQ ID NO: 5 |
| rh74 (RHM15-2) | 900 | US2015023924A1 SEQ ID NO: 7, |
| | | US20160375110A1 SEQ ID NO: 6 |
| rh74 (RHM15-3/RHM15-5) | 901 | US2015023924A1 SEQ ID NO: 8, |
| | | US20160375110A1 SEQ ID NO: 7 |
| rh74 (RHM15-4) | 902 | US2015023924A1 SEQ ID NO: 9, |
| | | US20160375110A1 SEQ ID NO: 8 |
| rh74 (RHM15-6) | 903 | US2015023924A1 SEQ ID NO: 10, |
| | | US20160375110A1 SEQ ID NO: 9 |
| rh74 (RHM4-1) | 904 | US2015023924A1 SEQ ID NO: 11 |
| rh74 (RHM15-1) | 905 | US2015023924A1 SEQ ID NO: 12 |
| rh74 (RHM15-2) | 906 | US2015023924A1 SEQ ID NO: 13 |
| rh74 (RHM15-3/RHM15-5) | 907 | US2015023924A1 SEQ ID NO: 14 |
| rh74 (RHM15-4) | 908 | US2015023924A1 SEQ ID NO: 15 |
| rh74 (RHM15-6) | 909 | US2015023924A1 SEQ ID NO: 16 |
| AAV2 (comprising lung | 910 | US20160175389A1 SEQ ID NO: 9 |
| specific polypeptide) | | |
| AAV2 (comprising lung | 911 | US20160175389A1 SEQ ID NO: 10 |
| specific polypeptide) | | |
| Anc80 | 912 | US20170051257A1 SEQ ID NO: 1 |
| Anc80 | 913 | US20170051257A1 SEQ ID NO: 2 |
| Anc81 | 914 | US20170051257A1 SEQ ID NO: 3 |
| Anc80 | 915 | US20170051257A1 SEQ ID NO: 4 |
| Anc82 | 916 | US20170051257A1 SEQ ID NO: 5 |
| Anc82 | 917 | US20170051257A1 SEQ ID NO: 6 |
| Anc83 | 918 | US20170051257A1 SEQ ID NO: 7 |
| Anc83 | 919 | US20170051257A1 SEQ ID NO: 8 |
| Anc84 | 920 | US20170051257A1 SEQ ID NO: 9 |
| Anc84 | 921 | US20170051257A1 SEQ ID NO: 10 |
| Anc94 | 922 | US20170051257A1 SEQ ID NO: 11 |
| Anc94 | 923 | US20170051257A1 SEQ ID NO: 12 |
| Anc113 | 924 | US20170051257A1 SEQ ID NO: 13 |
| Anc113 | 925 | US20170051257A1 SEQ ID NO: 14 |
| Anc126 | 926 | US20170051257A1 SEQ ID NO: 15 |
| Anc126 | 927 | US20170051257A1 SEQ ID NO: 16 |
| Anc127 | 928 | US20170051257A1 SEQ ID NO: 17 |
| Anc127 | 929 | US20170051257A1 SEQ ID NO: 18 |
| Anc80L27 | 930 | US20170051257A1 SEQ ID NO: 19 |
| Anc80L59 | 931 | US20170051257A1 SEQ ID NO: 20 |
| Anc80L60 | 932 | US20170051257A1 SEQ ID NO: 21 |
| Anc80L62 | 933 | US20170051257A1 SEQ ID NO: 22 |
| Anc80L65 | 934 | US20170051257A1 SEQ ID NO: 23 |
| Anc80L33 | 935 | US20170051257A1 SEQ ID NO: 24 |
| Anc80L36 | 936 | US20170051257A1 SEQ ID NO: 25 |
| Anc80L44 | 937 | US20170051257A1 SEQ ID NO: 26 |
| Anc80L1 | 938 | US20170051257A1 SEQ ID NO: 35 |
| Anc80L1 | 939 | US20170051257A1 SEQ ID NO: 36 |
| AAV-X1 | 940 | U.S. Pat. No. 8,283,151B2 SEQ ID NO: 11 |
| AAV-X1b | 941 | U.S. Pat. No. 8,283,151B2 SEQ ID NO: 12 |
| AAV-X5 | 942 | U.S. Pat. No. 8,283,151B2 SEQ ID NO: 13 |
| AAV-X19 | 943 | U.S. Pat. No. 8,283,151B2 SEQ ID NO: 14 |
| AAV-X21 | 944 | U.S. Pat. No. 8,283,151B2 SEQ ID NO: 15 |
| AAV-X22 | 945 | U.S. Pat. No. 8,283,151B2 SEQ ID NO: 16 |
| AAV-X23 | 946 | U.S. Pat. No. 8,283,151B2 SEQ ID NO: 17 |
| AAV-X24 | 947 | U.S. Pat. No. 8,283,151B2 SEQ ID NO: 18 |
| AAV-X25 | 948 | U.S. Pat. No. 8,283,151B2 SEQ ID NO: 19 |
| AAV-X26 | 949 | U.S. Pat. No. 8,283,151B2 SEQ ID NO: 20 |
| AAV-X1 | 950 | U.S. Pat. No. 8,283,151B2 SEQ ID NO: 21 |
| AAV-X1b | 951 | U.S. Pat. No. 8,283,151B2 SEQ ID NO: 22 |
| AAV-X5 | 952 | U.S. Pat. No. 8,283,151B2 SEQ ID NO: 23 |
| AAV-X19 | 953 | U.S. Pat. No. 8,283,151B2 SEQ ID NO: 24 |
| AAV-X21 | 954 | U.S. Pat. No. 8,283,151B2 SEQ ID NO: 25 |
| AAV-X22 | 955 | U.S. Pat. No. 8,283,151B2 SEQ ID NO: 26 |
| AAV-X23 | 956 | U.S. Pat. No. 8,283,151B2 SEQ ID NO: 27 |
| AAV-X24 | 957 | U.S. Pat. No. 8,283,151B2 SEQ ID NO: 28 |
| AAV-X25 | 958 | U.S. Pat. No. 8,283,151B2 SEQ ID NO: 29 |
| AAV-X26 | 959 | U.S. Pat. No. 8,283,151B2 SEQ ID NO: 30 |
| AAVrh8 | 960 | WO2016054554A1 SEQ ID NO: 8 |
| AAVrh8VP2FC5 | 961 | WO2016054554A1 SEQ ID NO: 9 |
| AAVrh8VP2FC44 | 962 | WO2016054554A1 SEQ ID NO: 10 |
| AAVrh8VP2ApoB100 | 963 | WO2016054554A1 SEQ ID NO: 11 |
| AAVrh8VP2RVG | 964 | WO2016054554A1 SEQ ID NO: 12 |
| AAVrh8VP2Angiopep-2 | 965 | WO2016054554A1 SEQ ID NO: 13 |
| VP2 | | |
| AAV9.47VP1.3 | 966 | WO2016054554A1 SEQ ID NO: 14 |
| AAV9.47VP2ICAMg3 | 967 | WO2016054554A1 SEQ ID NO: 15 |
| AAV9.47VP2RVG | 968 | WO2016054554A1 SEQ ID NO: 16 |
| AAV9.47VP2Angiopep-2 | 969 | WO2016054554A1 SEQ ID NO: 17 |
| AAV9.47VP2A-string | 970 | WO2016054554A1 SEQ ID NO: 18 |
| AAVrh8VP2FC5 VP2 | 971 | WO2016054554A1 SEQ ID NO: 19 |
| AAVrb8VP2FC44 VP2 | 972 | WO2016054554A1 SEQ ID NO: 20 |
| AAVrh8VP2ApoB100 VP2 | 973 | WO2016054554A1 SEQ ID NO: 21 |
| AAVrh8VP2RVG VP2 | 974 | WO2016054554A1 SEQ ID NO: 22 |
| AAVrh8VP2Angiopep-2 | 975 | WO2016054554A1 SEQ ID NO: 23 |
| VP2 | | |
| AAV9.47VP2ICAMg3 VP2 | 976 | WO2016054554A1 SEQ ID NO: 24 |
| AAV9.47VP2RVG VP2 | 977 | WO2016054554A1 SEQ ID NO: 25 |
| AAV9.47VP2Angiopep-2 | 978 | WO2016054554A1 SEQ ID NO: 26 |
| VP2 | | |
| AAV9.47VP2A-string VP2 | 979 | WO2016054554A1 SEQ ID NO: 27 |
| rAAV-B1 | 980 | WO2016054557A1 SEQ ID NO: 1 |
| rAAV-B2 | 981 | WO2016054557A1 SEQ ID NO: 2 |
| rAAV-B3 | 982 | WO2016054557A1 SEQ ID NO: 3 |
| rAAV-B4 | 983 | WO2016054557A1 SEQ ID NO: 4 |
| rAAV-B1 | 984 | WO2016054557A1 SEQ ID NO: 5 |
| rAAV-B2 | 985 | WO2016054557A1 SEQ ID NO: 6 |
| rAAV-B3 | 986 | WO2016054557A1 SEQ ID NO: 7 |
| rAAV-B4 | 987 | WO2016054557A1 SEQ ID NO: 8 |
| rAAV-L1 | 988 | WO2016054557A1 SEQ ID NO: 9 |
| rAAV-L2 | 989 | WO2016054557A1 SEQ ID NO: 10 |
| rAAV-L3 | 990 | WO2016054557A1 SEQ ID NO: 11 |
| rAAV-L4 | 991 | WO2016054557A1 SEQ ID NO: 12 |
| rAAV-L1 | 992 | WO2016054557A1 SEQ ID NO: 13 |
| rAAV-L2 | 993 | WO2016054557A1 SEQ ID NO: 14 |
| rAAV-L3 | 994 | WO2016054557A1 SEQ ID NO: 15 |
| rAAV-L4 | 995 | WO2016054557A1 SEQ ID NO: 16 |
| AAV9 | 996 | WO2016073739A1 SEQ ID NO: 3 |
| rAAV | 997 | WO2016081811A1 SEQ ID NO: 1 |
| rAAV | 998 | WO2016081811A1 SEQ ID NO: 2 |
| rAAV | 999 | WO2016081811A1 SEQ ID NO: 3 |
| rAAV | 1000 | WO2016081811A1 SEQ ID NO: 4 |
| rAAV | 1001 | WO2016081811A1 SEQ ID NO: 5 |
| rAAV | 1002 | WO2016081811A1 SEQ ID NO: 6 |
| rAAV | 1003 | WO2016081811A1 SEQ ID NO: 7 |
| rAAV | 1004 | WO2016081811A1 SEQ ID NO: 8 |
| rAAV | 1005 | WO2016081811A1 SEQ ID NO: 9 |
| rAAV | 1006 | WO2016081811A1 SEQ ID NO: 10 |
| rAAV | 1007 | WO2016081811A1 SEQ ID NO: 11 |
| rAAV | 1008 | WO2016081811A1 SEQ ID NO: 12 |
| rAAV | 1009 | WO2016081811A1 SEQ ID NO: 13 |
| rAAV | 1010 | WO2016081811A1 SEQ ID NO: 14 |
| rAAV | 1011 | WO2016081811A1 SEQ ID NO: 15 |
| rAAV | 1012 | WO2016081811A1 SEQ ID NO: 16 |
| rAAV | 1013 | WO2016081811A1 SEQ ID NO: 17 |
| rAAV | 1014 | WO2016081811A1 SEQ ID NO: 18 |
| rAAV | 1015 | WO2016081811A1 SEQ ID NO: 19 |
| rAAV | 1016 | WO2016081811A1 SEQ ID NO: 20 |
| rAAV | 1017 | WO2016081811A1 SEQ ID NO: 21 |
| rAAV | 1018 | WO2016081811A1 SEQ ID NO: 22 |
| rAAV | 1019 | WO2016081811A1 SEQ ID NO: 23 |
| rAAV | 1020 | WO2016081811A1 SEQ ID NO: 24 |
| rAAV | 1021 | WO2016081811A1 SEQ ID NO: 25 |
| rAAV | 1022 | WO2016081811A1 SEQ ID NO: 26 |
| rAAV | 1023 | WO2016081811A1 SEQ ID NO: 27 |
| rAAV | 1024 | WO2016081811A1 SEQ ID NO: 28 |
| rAAV | 1025 | WO2016081811A1 SEQ ID NO: 29 |
| rAAV | 1026 | WO2016081811A1 SEQ ID NO: 30 |
| rAAV | 1027 | WO2016081811A1 SEQ ID NO: 31 |
| rAAV | 1028 | WO2016081811A1 SEQ ID NO: 32 |
| rAAV | 1029 | WO2016081811A1 SEQ ID NO: 33 |
| rAAV | 1030 | WO2016081811A1 SEQ ID NO: 34 |
| rAAV | 1031 | WO2016081811A1 SEQ ID NO: 35 |
| rAAV | 1032 | WO2016081811A1 SEQ ID NO: 36 |
| rAAV | 1033 | WO2016081811A1 SEQ ID NO: 37 |
| rAAV | 1034 | WO2016081811A1 SEQ ID NO: 38 |
| rAAV | 1035 | WO2016081811A1 SEQ ID NO: 39 |
| rAAV | 1036 | WO2016081811A1 SEQ ID NO: 40 |
| rAAV | 1037 | WO2016081811A1 SEQ ID NO: 41 |
| rAAV | 1038 | WO2016081811A1 SEQ ID NO: 42 |
| rAAV | 1039 | WO2016081811A1 SEQ ID NO: 43 |
| rAAV | 1040 | WO2016081811A1 SEQ ID NO: 44 |
| rAAV | 1041 | WO2016081811A1 SEQ ID NO: 45 |
| rAAV | 1042 | WO2016081811A1 SEQ ID NO: 46 |
| rAAV | 1043 | WO2016081811A1 SEQ ID NO: 47 |
| rAAV | 1044 | WO2016081811A1 SEQ ID NO: 48 |
| rAAV | 1045 | WO2016081811A1 SEQ ID NO: 49 |
| rAAV | 1046 | WO2016081811A1 SEQ ID NO: 50 |
| rAAV | 1047 | WO2016081811A1 SEQ ID NO: 51 |
| rAAV | 1048 | WO2016081811A1 SEQ ID NO: 52 |
| rAAV | 1049 | WO2016081811A1 SEQ ID NO: 53 |
| rAAV | 1050 | WO2016081811A1 SEQ ID NO: 54 |
| rAAV | 1051 | WO2016081811A1 SEQ ID NO: 55 |
| rAAV | 1052 | WO2016081811A1 SEQ ID NO: 56 |
| rAAV | 1053 | WO2016081811A1 SEQ ID NO: 57 |
| rAAV | 1054 | WO2016081811A1 SEQ ID NO: 58 |
| rAAV | 1055 | WO2016081811A1 SEQ ID NO: 59 |
| rAAV | 1056 | WO2016081811A1 SEQ ID NO: 60 |
| rAAV | 1057 | WO2016081811A1 SEQ ID NO: 61 |
| rAAV | 1058 | WO2016081811A1 SEQ ID NO: 62 |
| rAAV | 1059 | WO2016081811A1 SEQ ID NO: 63 |
| rAAV | 1060 | WO2016081811A1 SEQ ID NO: 64 |
| rAAV | 1061 | WO2016081811A1 SEQ ID NO: 65 |
| rAAV | 1062 | WO2016081811A1 SEQ ID NO: 66 |
| rAAV | 1063 | WO2016081811A1 SEQ ID NO: 67 |
| rAAV | 1064 | WO2016081811A1 SEQ ID NO: 68 |
| rAAV | 1065 | WO2016081811A1 SEQ ID NO: 69 |
| rAAV | 1066 | WO2016081811A1 SEQ ID NO: 70 |
| rAAV | 1067 | WO2016081811A1 SEQ ID NO: 71 |
| rAAV | 1068 | WO2016081811A1 SEQ ID NO: 72 |
| rAAV | 1069 | WO2016081811A1 SEQ ID NO: 73 |
| rAAV | 1070 | WO2016081811A1 SEQ ID NO: 74 |
| rAAV | 1071 | WO2016081811A1 SEQ ID NO: 75 |
| rAAV | 1072 | WO2016081811A1 SEQ ID NO: 76 |
| rAAV | 1073 | WO2016081811A1 SEQ ID NO: 77 |
| rAAV | 1074 | WO2016081811A1 SEQ ID NO: 78 |
| rAAV | 1075 | WO2016081811A1 SEQ ID NO: 79 |
| rAAV | 1076 | WO2016081811A1 SEQ ID NO: 80 |
| rAAV | 1077 | WO2016081811A1 SEQ ID NO: 81 |
| rAAV | 1078 | WO2016081811A1 SEQ ID NO: 82 |
| rAAV | 1079 | WO2016081811A1 SEQ ID NO: 83 |
| rAAV | 1080 | WO2016081811A1 SEQ ID NO: 84 |
| rAAV | 1081 | WO2016081811A1 SEQ ID NO: 85 |
| rAAV | 1082 | WO2016081811A1 SEQ ID NO: 86 |
| rAAV | 1083 | WO2016081811A1 SEQ ID NO: 87 |
| rAAV | 1084 | WO2016081811A1 SEQ ID NO: 88 |
| rAAV | 1085 | WO2016081811A1 SEQ ID NO: 89 |
| rAAV | 1086 | WO2016081811A1 SEQ ID NO: 90 |
| rAAV | 1087 | WO2016081811A1 SEQ ID NO: 91 |
| rAAV | 1088 | WO2016081811A1 SEQ ID NO: 92 |
| rAAV | 1089 | WO2016081811A1 SEQ ID NO: 93 |
| rAAV | 1090 | WO2016081811A1 SEQ ID NO: 94 |
| rAAV | 1091 | WO2016081811A1 SEQ ID NO: 95 |
| rAAV | 1092 | WO2016081811A1 SEQ ID NO: 96 |
| rAAV | 1093 | WO2016081811A1 SEQ ID NO: 97 |
| rAAV | 1094 | WO2016081811A1 SEQ ID NO: 98 |
| rAAV | 1095 | WO2016081811A1 SEQ ID NO: 99 |
| rAAV | 1096 | WO2016081811A1 SEQ ID NO: 100 |
| rAAV | 1097 | WO2016081811A1 SEQ ID NO: 101 |
| rAAV | 1098 | WO2016081811A1 SEQ ID NO: 102 |
| rAAV | 1099 | WO2016081811A1 SEQ ID NO: 103 |
| rAAV | 1100 | WO2016081811A1 SEQ ID NO: 104 |
| rAAV | 1101 | WO2016081811A1 SEQ ID NO: 105 |
| rAAV | 1102 | WO2016081811A1 SEQ ID NO: 106 |
| rAAV | 1103 | WO2016081811A1 SEQ ID NO: 107 |
| rAAV | 1104 | WO2016081811A1 SEQ ID NO: 108 |
| rAAV | 1105 | WO2016081811A1 SEQ ID NO: 109 |
| rAAV | 1106 | WO2016081811A1 SEQ ID NO: 110 |
| rAAV | 1107 | WO2016081811A1 SEQ ID NO: 111 |
| rAAV | 1108 | WO2016081811A1 SEQ ID NO: 112 |
| rAAV | 1109 | WO2016081811A1 SEQ ID NO: 113 |
| rAAV | 1110 | WO2016081811A1 SEQ ID NO: 114 |
| rAAV | 1111 | WO2016081811A1 SEQ ID NO: 115 |
| rAAV | 1112 | WO2016081811A1 SEQ ID NO: 116 |
| rAAV | 1113 | WO2016081811A1 SEQ ID NO: 117 |
| rAAV | 1114 | WO2016081811A1 SEQ ID NO: 118 |
| rAAV | 1115 | WO2016081811A1 SEQ ID NO: 119 |
| rAAV | 1116 | WO2016081811A1 SEQ ID NO: 120 |
| rAAV | 1117 | WO2016081811A1 SEQ ID NO: 121 |
| rAAV | 1118 | WO2016081811A1 SEQ ID NO: 122 |
| rAAV | 1119 | WO2016081811A1 SEQ ID NO: 123 |
| rAAV | 1120 | WO2016081811A1 SEQ ID NO: 124 |
| rAAV | 1121 | WO2016081811A1 SEQ ID NO: 125 |
| rAAV | 1122 | WO2016081811A1 SEQ ID NO: 126 |
| rAAV | 1123 | WO2016081811A1 SEQ ID NO: 127 |
| rAAV | 1124 | WO2016081811A1 SEQ ID NO: 128 |
| AAV8 E532K | 1125 | WO2016081811A1 SEQ ID NO: 133 |
| AAV8 E532K | 1126 | WO2016081811A1 SEQ ID NO: 134 |
| rAAV4 | 1127 | WO2016115382A1 SEQ ID NO: 2 |
| rAAV4 | 1128 | WO2016115382A1 SEQ ID NO: 3 |
| rAAV4 | 1129 | WO2016115382A1 SEQ ID NO: 4 |
| rAAV4 | 1130 | WO2016115382A1 SEQ ID NO: 5 |
| rAAV4 | 1131 | WO2016115382A1 SEQ ID NO: 6 |
| rAAV4 | 1132 | WO2016115382A1 SEQ ID NO: 7 |
| rAAV4 | 1133 | WO2016115382A1 SEQ ID NO: 8 |
| rAAV4 | 1134 | WO2016115382A1 SEQ ID NO: 9 |
| rAAV4 | 1135 | WO2016115382A1 SEQ ID NO: 10 |
| rAAV4 | 1136 | WO2016115382A1 SEQ ID NO: 11 |
| rAAV4 | 1137 | WO2016115382A1 SEQ ID NO: 12 |
| rAAV4 | 1138 | WO2016115382A1 SEQ ID NO: 13 |
| rAAV4 | 1139 | WO2016115382A1 SEQ ID NO: 14 |
| rAAV4 | 1140 | WO2016115382A1 SEQ ID NO: 15 |
| rAAV4 | 1141 | WO2016115382A1 SEQ ID NO: 16 |
| rAAV4 | 1142 | WO2016115382A1 SEQ ID NO: 17 |
| rAAV4 | 1143 | WO2016115382A1 SEQ ID NO: 18 |
| rAAV4 | 1144 | WO2016115382A1 SEQ ID NO: 19 |
| rAAV4 | 1145 | WO2016115382A1 SEQ ID NO: 20 |
| rAAV4 | 1146 | WO2016115382A1 SEQ ID NO: 21 |
| AAV11 | 1147 | WO2016115382A1 SEQ ID NO: 22 |
| AAV12 | 1148 | WO2016115382A1 SEQ ID NO: 23 |
| rh32 | 1149 | WO2016115382A1 SEQ ID NO: 25 |
| rh33 | 1150 | WO2016115382A1 SEQ ID NO: 26 |
| rh34 | 1151 | WO2016115382A1 SEQ ID NO: 27 |
| rAAV4 | 1152 | WO2016115382A1 SEQ ID NO: 28 |
| rAAV4 | 1153 | WO2016115382A1 SEQ ID NO: 29 |
| rAAV4 | 1154 | WO2016115382A1 SEQ ID NO: 30 |
| rAAV4 | 1155 | WO2016115382A1 SEQ ID NO: 31 |
| rAAV4 | 1156 | WO2016115382A1 SEQ ID NO: 32 |
| rAAV4 | 1157 | WO2016115382A1 SEQ ID NO: 33 |
| AAV2/8 | 1158 | WO2016131981A1 SEQ ID NO: 47 |
| AAV2/8 | 1159 | WO2016131981A1 SEQ ID NO: 48 |
| ancestral AAV | 1160 | WO2016154344A1 SEQ ID NO: 7 |
| ancestral AAV variant C4 | 1161 | WO2016154344A1 SEQ ID NO: 13 |
| ancestral AAV variant C7 | 1162 | WO2016154344A1 SEQ ID NO: 14 |
| ancestral AAV variant G4 | 1163 | WO2016154344A1 SEQ ID NO: 15 |
| consensus amino acid | 1164 | WO2016154344A1 SEQ ID NO: 16 |
| sequence of ancestral AAV | | |
| variants, C4, C7 and G4 | | |
| consensus amino acid | 1165 | WO2016154344A1 SEQ ID NO: 17 |
| sequence of ancestral AAV | | |
| variants, C4 and C7 | | |
| AAV8 (with a AAV2 | 1166 | WO2016150403A1 SEQ ID NO: 13 |
| phospholipase domain) | | |
| AAV VR-942n | 1167 | US20160289275A1 SEQ ID NO: 10 |
| AAV5-A (M569V) | 1168 | US20160289275A1 SEQ ID NO: 13 |
| AAV5-A (M569V) | 1169 | US20160289275A1 SEQ ID NO: 14 |
| AAV5-A (Y585V) | 1170 | US20160289275A1 SEQ ID NO: 16 |
| AAV5-A (Y585V) | 1171 | US20160289275A1 SEQ ID NO: 17 |
| AAV5-A (L587T) | 1172 | US20160289275A1 SEQ ID NO: 19 |
| AAV5-A (L587T) | 1173 | US20160289275A1 SEQ ID NO: 20 |
| AAV5-A (Y585V/L587T) | 1174 | US20160289275A1 SEQ ID NO: 22 |
| AAV5-A (Y585V/L587T) | 1175 | US20160289275A1 SEQ ID NO: 23 |
| AAV5-B (D652A) | 1176 | US20160289275A1 SEQ ID NO: 25 |
| AAV5-B (D652A) | 1177 | US20160289275A1 SEQ ID NO: 26 |
| AAV5-B (T362M) | 1178 | US20160289275A1 SEQ ID NO: 28 |
| AAV5-B (T362M) | 1179 | US20160289275A1 SEQ ID NO: 29 |
| AAV5-B (Q359D) | 1180 | US20160289275A1 SEQ ID NO: 31 |
| AAV5-B (Q359D) | 1181 | US20160289275A1 SEQ ID NO: 32 |
| AAV5-B (E350Q) | 1182 | US20160289275A1 SEQ ID NO: 34 |
| AAV5-B (E350Q) | 1183 | US20160289275A1 SEQ ID NO: 35 |
| AAV5-B (P533S) | 1184 | US20160289275A1 SEQ ID NO: 37 |
| AAV5-B (P533S) | 1185 | US20160289275A1 SEQ ID NO: 38 |
| AAV5-B (P533G) | 1186 | US20160289275A1 SEQ ID NO: 40 |
| AAV5-B (P533G) | 1187 | US20160289275A1 SEQ ID NO: 41 |
| AAV5-mutation in loop VII | 1188 | US20160289275A1 SEQ ID NO: 43 |
| AAV5-mutation in loop VII | 1189 | US20160289275A1 SEQ ID NO: 44 |
| AAV8 | 1190 | US20160289275A1 SEQ ID NO: 47 |
| Mut A (LK03/AAV8) | 1191 | WO2016181123A1 SEQ ID NO: 1 |
| Mut B (LK03/AAV5) | 1192 | WO2016181123A1 SEQ ID NO: 2 |
| Mut C (AAV8/AAV3B) | 1193 | WO2016181123A1 SEQ ID NO: 3 |
| Mut D (AAV5/AAV3B) | 1194 | WO2016181123A1 SEQ ID NO: 4 |
| Mut E (AAV8/AAV3B) | 1195 | WO2016181123A1 SEQ ID NO: 5 |
| Mut F (AAV3B/AAV8) | 1196 | WO2016181123A1 SEQ ID NO: 6 |
| AAV44.9 | 1197 | WO2016183297A1 SEQ ID NO: 4 |
| AAV44.9 | 1198 | WO2016183297A1 SEQ ID NO: 5 |
| AAVrh8 | 1199 | WO2016183297A1 SEQ ID NO: 6 |
| AAV44.9 (S470N) | 1200 | WO2016183297A1 SEQ ID NO: 9 |
| rh74 VP1 | 1201 | US20160375110A1 SEQ ID NO: 1 |
| AAV-LK03 (L125I) | 1202 | WO2017015102A1 SEQ ID NO: 5 |
| AAV3B (S663V + T492V) | 1203 | WO2017015102A1 SEQ ID NO: 6 |
| Anc80 | 1204 | WO2017019994A2 SEQ ID NO: 1 |
| Anc80 | 1205 | WO2017019994A2 SEQ ID NO: 2 |
| Anc81 | 1206 | WO2017019994A2 SEQ ID NO: 3 |
| Anc81 | 1207 | WO2017019994A2 SEQ ID NO: 4 |
| Anc82 | 1208 | WO2017019994A2 SEQ ID NO: 5 |
| Anc82 | 1209 | WO2017019994A2 SEQ ID NO: 6 |
| Anc83 | 1210 | WO2017019994A2 SEQ ID NO: 7 |
| Anc83 | 1211 | WO2017019994A2 SEQ ID NO: 8 |
| Anc84 | 1212 | WO2017019994A2 SEQ ID NO: 9 |
| Anc84 | 1213 | WO2017019994A2 SEQ ID NO: 10 |
| Anc94 | 1214 | WO2017019994A2 SEQ ID NO: 11 |
| Anc94 | 1215 | WO2017019994A2 SEQ ID NO: 12 |
| Anc113 | 1216 | WO2017019994A2 SEQ ID NO: 13 |
| Anc113 | 1217 | WO2017019994A2 SEQ ID NO: 14 |
| Anc126 | 1218 | WO2017019994A2 SEQ ID NO: 15 |
| Anc126 | 1219 | WO2017019994A2 SEQ ID NO: 16 |
| Anc127 | 1220 | WO2017019994A2 SEQ ID NO: 17 |
| Anc127 | 1221 | WO2017019994A2 SEQ ID NO: 18 |
| Anc80L27 | 1222 | WO2017019994A2 SEQ ID NO: 19 |
| Anc80L59 | 1223 | WO2017019994A2 SEQ ID NO: 20 |
| Anc80L60 | 1224 | WO2017019994A2 SEQ ID NO: 21 |
| Anc80L62 | 1225 | WO2017019994A2 SEQ ID NO: 22 |
| Anc80L65 | 1226 | WO2017019994A2 SEQ ID NO: 23 |
| Anc80L33 | 1227 | WO2017019994A2 SEQ ID NO: 24 |
| Anc80L36 | 1228 | WO2017019994A2 SEQ ID NO: 25 |
| Anc80L44 | 1229 | WO2017019994A2 SEQ ID NO: 26 |
| Anc80L1 | 1230 | WO2017019994A2 SEQ ID NO: 35 |
| Anc80L1 | 1231 | WO2017019994A2 SEQ ID NO: 36 |
| AAVrh10 | 1232 | WO2017019994A2 SEQ ID NO: 41 |
| Anc110 | 1233 | WO2017019994A2 SEQ ID NO: 42 |
| Anc110 | 1234 | WO2017019994A2 SEQ ID NO: 43 |
| AAVrh32.33 | 1235 | WO2017019994A2 SEQ ID NO: 45 |
| AAVrh74 | 1236 | WO2017049031A1 SEQ ID NO: 1 |
| AAV2 | 1237 | WO2017053629A2 SEQ ID NO: 49 |
| AAV2 | 1238 | WO2017053629A2 SEQ ID NO: 50 |
| AAV2 | 1239 | WO2017053629A2 SEQ ID NO: 82 |
| Parvo-like virus | 1240 | WO2017070476A2 SEQ ID NO: 1 |
| Parvo-like virus | 1241 | WO2017070476A2 SEQ ID NO: 2 |
| Parvo-like virus | 1242 | WO2017070476A2 SEQ ID NO: 3 |
| Parvo-like virus | 1243 | WO2017070476A2 SEQ ID NO: 4 |
| Parvo-like virus | 1244 | WO2017070476A2 SEQ ID NO: 5 |
| Parvo-like virus | 1245 | WO2017070476A2 SEQ ID NO: 6 |
| AAVrh.10 | 1246 | WO2017070516A1 SEQ ID NO: 7 |
| AAVrh.10 | 1247 | WO2017070516A1 SEQ ID NO: 14 |
| AAV2tYF | 1248 | WO2017070491A1 SEQ ID NO: 1 |
| AAV-SPK | 1249 | WO2017075619A1 SEQ ID NO: 28 |
| AAV2.5 | 1250 | US20170128528A1 SEQ ID NO: 13 |
| AAV1.1 | 1251 | US20170128528A1 SEQ ID NO: 15 |
| AAV6.1 | 1252 | US20170128528A1 SEQ ID NO: 17 |
| AAV6.3.1 | 1253 | US20170128528A1 SEQ ID NO: 18 |
| AAV2i8 | 1254 | US20170128528A1 SEQ ID NO: 28 |
| AAV2i8 | 1255 | US20170128528A1 SEQ ID NO: 29 |
| ttAAV | 1256 | US20170128528A1 SEQ ID NO: 30 |
| ttAAV-S312N | 1257 | US20170128528A1 SEQ ID NO: 32 |
| ttAAV-S312N | 1258 | US20170128528A1 SEQ ID NO: 33 |
| AAV6 (Y705, Y731, | 1259 | WO2016134337A1 SEQ ID NO: 24 |
| and T492) | | |
| AAV2 | 1260 | WO2016134375A1 SEQ ID NO: 9 |
| AAV2 | 1261 | WO2016134375A1 SEQ ID NO: 10 |

[0465] In some embodiments, the AAV serotype may be, or may have a sequence as described in International Patent Publication WO2015038958, the contents of which are herein incorporated by reference in their entirety, such as, but not limited to, AAV9 (SEQ ID NO: 2 and 11 of WO2015038958 or SEQ ID NO: 137 and 138 respectively herein), PHP.B (SEQ ID NO: 8 and 9 of WO2015038958, herein SEQ ID NO: 5 and 6), G2B-13 (SEQ ID NO: 12 of WO2015038958, herein SEQ ID NO: 7), G2B-26 (SEQ ID NO: 13 of WO2015038958, herein SEQ ID NO: 5), TH1.1-32 (SEQ ID NO: 14 of WO2015038958, herein SEQ ID NO: 8), TH1.1-35 (SEQ ID NO: 15 of WO2015038958, herein SEQ ID NO: 9) or variants thereof. Further, any of the targeting peptides or amino acid inserts described in WO2015038958, may be inserted into any parent AAV serotype, such as, but not limited to, AAV9 (SEQ ID NO: 137 for the DNA sequence and SEQ ID NO: 138 for the amino acid sequence). In some embodiments, the amino acid insert is inserted between amino acids 586-592 of the parent AAV (e.g., AAV9). In another embodiment, the amino acid insert is inserted between amino acids 588-589 of the parent AAV sequence. The amino acid insert may be, but is not limited to, any of the following amino acid sequences, TLAVPFK (herein SEQ ID NO: 1262), KFPVALT (SEQ ID NO: 1263), LAVPFK (SEQ ID NO: 1264), AVPFK (SEQ ID NO: 1265), VPFK (SEQ ID NO: 1266), TLAVPF (SEQ ID NO: 1267), TLAVP (SEQ ID NO: 1268), TLAV (SEQ ID NO: 1269), SVSKPFL (SEQ ID NO: 1270), FTLTTPK (SEQ ID NO: 1271), MNATKNV (SEQ ID NO: 1272), QSSQTPR (SEQ ID NO: 1273), ILGTGTS (SEQ ID NO: 1274), TRTNPEA (SEQ ID NO: 1275), NGGTSSS (SEQ ID NO: 1276), or YTLSQGW (SEQ ID NO: 1277). Non-limiting examples of nucleotide sequences that may encode the amino acid inserts include the following, SEQ ID NO: 1278, SEQ ID NO: 1279, SEQ ID NO: 1280, SEQ ID NO: 1281, SEQ ID NO: 1282, SEQ ID NO: 1283, SEQ ID NO: 1284, SEQ ID NO: 1285, SEQ ID NO: 1286, or SEQ ID NO: 1287.

[0466] In some embodiments, the AAV serotype may be, or may have a sequence as described in International Patent Publication WO2017100671, the contents of which are herein incorporated by reference in their entirety, such as, but not limited to, AAV9 (SEQ ID NO: 45 of WO2017100671, herein SEQ ID NO: 11), PHP.N (SEQ ID NO: 46 of WO2017100671, herein SEQ ID NO: 4), PHP.S (SEQ ID NO: 47 of WO2017100671, herein SEQ ID NO: 10), or variants thereof. Further, any of the targeting peptides or amino acid inserts described in WO2017100671 may be inserted into any parent AAV serotype, such as, but not limited to, AAV9. In some embodiments, the amino acid insert is inserted between amino acids 586-592 of the parent AAV (e.g., AAV9). In another embodiment, the amino acid insert is inserted between amino acids 588-589 of the parent AAV sequence. The amino acid insert may be, but is not limited to, any of the following amino acid sequences, AQTLAVPFKAQ (SEQ ID NO: 1288), AQSVSKPFLAQ (SEQ ID NO: 1289), AQFTLTTPKAQ (SEQ ID NO: 1290), DGTLAVPFKAQ (SEQ ID NO: 1291), ESTLAVPFKAQ (SEQ ID NO: 1292), GGTLAVPFKAQ (SEQ ID NO: 1293), AQTLATPFKAQ (SEQ ID NO: 1294), ATTLATPFKAQ (SEQ ID NO: 1295), DGTLATPFKAQ (SEQ ID NO: 1296), GGTLATPFKAQ (SEQ ID NO: 1297), SGSLAVPFKAQ (SEQ ID NO: 1298), AQTLAQPFKAQ (SEQ ID NO: 1299), AQTLQQPFKAQ (SEQ ID NO: 1300), AQTLSNPFKAQ (SEQ ID NO: 1301), AQTLAVPFSNP (SEQ ID NO: 1302), QGTLAVPFKAQ (SEQ ID NO: 1303), NQTLAVPFKAQ (SEQ ID NO: 1304), EGSLAVPFKAQ (SEQ ID NO: 1305), SGNLAVPFKAQ (SEQ ID NO: 1306), EGTLAVPFKAQ (SEQ ID NO: 1307), DSTLAVPFKAQ (SEQ ID NO: 1308), AVTLAVPFKAQ (SEQ ID NO: 1309), AQTLSTPFKAQ (SEQ ID NO: 1310), AQTLPQPFKAQ (SEQ ID NO: 1311), AQTLSQPFKAQ (SEQ ID NO: 1312), AQTLQLPFKAQ (SEQ ID NO: 1313), AQTLTMPFKAQ (SEQ ID NO: 1314), AQTLTTPFKAQ (SEQ ID NO: 1315), AQYTLSQGWAQ (SEQ ID NO: 1316), AQMNATKNVAQ (SEQ ID NO: 1317), AQVSGGHHSAQ (SEQ ID NO: 1318), AQTLTAPFKAQ (SEQ ID NO: 1319), AQTLSKPFKAQ (SEQ ID NO: 1320), QAVRTSL (SEQ ID NO: 1321), YTLSQGW (SEQ ID NO: 1277), LAKERLS (SEQ ID NO: 1322), TLAVPFK (SEQ ID NO: 1262), SVSKPFL (SEQ ID NO: 1270), FTLTTPK (SEQ ID NO: 1271), MNSTKNV (SEQ ID NO: 1323), VSGGHHS (SEQ ID NO: 1324), SAQTLAVPFKAQAQ (SEQ ID NO: 1325), SXXXLAVPFKAQAQ (wherein X may be any amino acid; SEQ ID NO: 1326), SAQXXXVPFKAQAQ (wherein X may be any amino acid; SEQ ID NO: 1327), SAQTLXXXFKAQAQ (wherein X may be any amino acid; SEQ ID NO: 1328), SAQTLAVXXXAQAQ (wherein X may be any amino acid; SEQ ID NO: 1329), SAQTLAVPFXXXAQ (wherein X may be any amino acid; SEQ ID NO: 1330), TNHQSAQ (SEQ ID NO: 1331), AQAQTGW (SEQ ID NO: 1332), DGTLATPFK (SEQ ID NO: 1333), DGTLATPFKXX (wherein X may be any amino acid; SEQ ID NO: 1334), LAVPFKAQ (SEQ ID NO: 1335), VPFKAQ (SEQ ID NO: 1336), FKAQ (SEQ ID NO: 1337), AQTLAV (SEQ ID NO: 1338), AQTLAVPF (SEQ ID NO: 1339), QAVR (SEQ ID NO: 1340), AVRT (SEQ ID NO: 1341), VRTS (SEQ ID NO: 1342), RTSL (SEQ ID NO: 1343), QAVRT (SEQ ID NO: 1344), AVRTS (SEQ ID NO: 1345), VRTSL (SEQ ID NO: 1346), QAVRTS (SEQ ID NO: 1347), or AVRTSL (SEQ ID NO: 1348). Non-limiting examples of nucleotide sequences that may encode the amino acid inserts include the following, SEQ ID NO: 1349, SEQ ID NO: 1350, SEQ ID NO: 1351, SEQ ID NO: 1352, SEQ ID NO: 1353, SEQ ID NO: 1354, SEQ ID NO: 1355, SEQ ID NO: 1356, SEQ ID NO: 1357, SEQ ID NO: 1358 (wherein N may be A, C, T, or G), SEQ ID NO: 1359 (wherein N may be A, C, T, or G), SEQ ID NO: 1360 (wherein N may be A, C, T, or G), SEQ ID NO: 1361 (wherein N may be A, C, T, or G); herein SEQ ID NO: 1362 (wherein N may be A, C, T, or G), SEQ ID NO: 1279, SEQ ID NO: 1280, SEQ ID NO: 1281, SEQ ID NO: 1287, or SEQ ID NO: 1363.

[0467] In some embodiments, the AAV serotype may be, or may have a sequence as described in U.S. Pat. No. 9,624,274, the contents of which are herein incorporated by reference in their entirety, such as, but not limited to, AAV1 (SEQ ID NO: 181 of U.S. Pat. No. 9,624,274), AAV6 (SEQ ID NO: 182 of U.S. Pat. No. 9,624,274), AAV2 (SEQ ID NO: 183 of U.S. Pat. No. 9,624,274), AAV3b (SEQ ID NO: 184 of U.S. Pat. No. 9,624,274), AAV7 (SEQ ID NO: 185 of U.S. Pat. No. 9,624,274), AAV8 (SEQ ID NO: 186 of U.S. Pat. No. 9,624,274), AAV10 (SEQ ID NO: 187 of U.S. Pat. No. 9,624,274), AAV4 (SEQ ID NO: 188 of U.S. Pat. No. 9,624,274), AAV11 (SEQ ID NO: 189 of U.S. Pat. No. 9,624,274), bAAV (SEQ ID NO: 190 of U.S. Pat. No. 9,624,274), AAV5 (SEQ ID NO: 191 of U.S. Pat. No. 9,624,274), GPV (SEQ ID NO: 192 of U.S. Pat. No. 9,624,274; herein SEQ ID NO: 879), B19 (SEQ ID NO: 193 of U.S. Pat. No. 9,624,274; herein SEQ ID NO: 880), MVM (SEQ ID NO: 194 of U.S. Pat. No. 9,624,274; herein SEQ ID NO: 881), FPV (SEQ ID NO: 195 of U.S. Pat. No. 9,624,274; herein SEQ ID NO: 882), CPV (SEQ ID NO: 196 of U.S. Pat. No. 9,624,274; herein SEQ ID NO: 883) or variants thereof. Further, any of the structural protein inserts described in U.S. Pat. No. 9,624,274, may be inserted into, but not limited to, I-453 and I-587 of any parent AAV serotype, such as, but not limited to, AAV2 (SEQ ID NO: 183 of U.S. Pat. No. 9,624,274). The amino acid insert may be, but is not limited to, any of the following amino acid sequences, VNLTWSRASG (SEQ ID NO: 1364), EFCINHRGYWVCGD (SEQ ID NO: 1365), EDGQVMDVDLS (SEQ ID NO: 1366), EKQRNGTLT (SEQ ID NO: 1367), TYQCRVTHPHLPRALMR (SEQ ID NO: 1368), RHSTTQPRKTKGSG (SEQ ID NO: 1369), DSNPRGVSAYLSR (SEQ ID NO: 1370), TITCLWDLAPSK (SEQ ID NO: 1371), KTKGSGFFVF (SEQ ID NO: 1372), THPHLPRALMRS (SEQ ID NO: 1373), GETYQCRVTHPHLPRALMRSTTK (SEQ ID NO: 1374), LPRALMRS (SEQ ID NO: 1375), INHRGYWV (SEQ ID NO: 1376), CDAGSVRTNAPD (SEQ ID NO: 1377), AKAVSNLTESRSESLQS (SEQ ID NO: 1378), SLTGDEFKKVLET (SEQ ID NO: 1379), REAVAYRFEED (SEQ ID NO: 1380), INPEIITLDG (SEQ ID NO: 1381), DISVTGAPVITATYL (SEQ ID NO: 1382), DISVTGAPVITA (SEQ ID NO: 1383), PKTVSNLTESSSESVQS (SEQ ID NO: 1384), SLMGDEFKAVLET (SEQ ID NO: 1385), QHSVAYTFEED (SEQ ID NO: 1386), INPEIITRDG (SEQ ID NO: 1387), DISLTGDPVITASYL (SEQ ID NO: 1388), DISLTGDPVITA (SEQ ID NO: 1389), DQSIDFEIDSA (SEQ ID NO: 1390), KNVSEDLPLPTFSPTLLGDS (SEQ ID NO: 1391), KNVSEDLPLPT (SEQ ID NO: 1392), CDSGRVRTDAPD (SEQ ID NO: 1393), FPEHLLVDFLQSLS (SEQ ID NO: 1394), DAEFRHDSG (SEQ ID NO: 1395), HYAAAQWDFGNTMCQL (SEQ ID NO: 1396), YAAQWDFGNTMCQ (SEQ ID NO: 1397), RSQKEGLHYT (SEQ ID NO: 1398), SSRTPSDKPVAHWANPQAE (SEQ ID NO: 1399), SRTPSDKPVAHWANP (SEQ ID NO: 1400), SSRTPSDKP (SEQ ID NO: 1401), NADGNVDYHMNSVP (SEQ ID NO: 1402), DGNVDYHMNSV (SEQ ID NO: 1403), RSFKEFLQSSLRALRQ (SEQ ID NO: 1404); FKEFLQSSLRA (SEQ ID NO: 1405), or QMWAPQWGPD (SEQ ID NO: 1406).

[0468] In some embodiments, the AAV serotype may be, or may have a sequence as described in U.S. Pat. No. 9,475,845, the contents of which are herein incorporated by reference in their entirety, such as, but not limited to, AAV capsid proteins comprising modification of one or more amino acids at amino acid positions 585 to 590 of the native AAV2 capsid protein. Further the modification may result in, but not be limited to, the amino acid sequence RGNRQA (SEQ ID NO: 1407), SSSTDP (SEQ ID NO: 1408), SSNTAP (SEQ ID NO: 1409), SNSNLP (herein SEQ ID NO: 1410), SSTTAP (SEQ ID NO: 1411), AANTAA (SEQ ID NO: 1412), QQNTAP (SEQ ID NO: 1413), SAQAQA (SEQ ID NO: 1414), QANTGP (SEQ ID NO: 1415), NATTAP (SEQ ID NO: 1416), SSTAGP (SEQ ID NO: 1417), QQNTAA (SEQ ID NO: 1418), PSTAGP (SEQ ID NO: 1419), NQNTAP (SEQ ID NO: 1420), QAANAP (SEQ ID NO: 1421), SIVGLP (SEQ ID NO: 1422), AASTAA (SEQ ID NO: 1423), SQNTTA (SEQ ID NO: 1424), QQDTAP (SEQ ID NO: 1425), QTNTGP (SEQ ID NO: 1426), QTNGAP (SEQ ID NO: 1427), QQNAAP (SEQ ID NO: 1428), or AANTQA (SEQ ID NO: 1429). In some embodiments, the amino acid modification is a substitution at amino acid positions 262 through 265 in the native AAV2 capsid protein or the corresponding position in the capsid protein of another AAV with a targeting sequence. The targeting sequence may be, but is not limited to, any of the amino acid sequences, NGRAHA (SEQ ID NO: 1430), QPEHSST (SEQ ID NO: 1431), VNTANST (SEQ ID NO: 1432), HGPMQKS (SEQ ID NO: 1433), PHKPPLA (SEQ ID NO: 1434), IKNNEMW (SEQ ID NO: 1435), RNLDTPM (SEQ ID NO: 1436), VDSHRQS (SEQ ID NO: 1437), YDSKTKT (SEQ ID NO: 1438), SQLPHQK (SEQ ID NO: 1439), STMQQNT (SEQ ID NO: 1440), TERYMTQ (SEQ ID NO: 1441), DASLSTS (SEQ ID NO: 1442), DLPNKKT (SEQ ID NO: 1443), DLTAARL (SEQ ID NO: 1444), EPHQFNY (SEQ ID NO: 1445), EPQSNHT (SEQ ID NO: 1446), MSSWPSQ (SEQ ID NO: 1447), NPKHNAT (SEQ ID NO: 1448), PDGMRTT (SEQ ID NO: 1449), PNNNKTT (SEQ ID NO: 1450), QSTTHDS (SEQ ID NO: 1451), TGSKQKQ (SEQ ID NO: 1452), SLKHQAL (SEQ ID NO: 1453), SPIDGEQ (SEQ ID NO: 1454), WIFPWIQL (SEQ ID NO: 1455), CDCRGDCFC (SEQ ID NO: 1456), CNGRC (SEQ ID NO: 1457), CPRECES (SEQ ID NO: 1458), CTTHWGFTLC (SEQ ID NO: 1459), CGRRAGGSC (SEQ ID NO: 1460), CKGGRAKDC (SEQ ID NO: 1461), CVPELGHEC (SEQ ID NO: 1462), CRRETAWAK (SEQ ID NO: 1463), VSWFSHRYSPFAVS (SEQ ID NO: 1464), GYRDGYAGPILYN (SEQ ID NO: 1465), XXXYXXX (SEQ ID NO: 1466), YXNW (SEQ ID NO: 1467), RPLPPLP (SEQ ID NO: 1468), APPLPPR (SEQ ID NO: 1469), DVFYPYPYASGS (SEQ ID NO: 1470), MYWYPY (SEQ ID NO: 1471), DITWDQLWDLMK (SEQ ID NO: 1472), CWDDXWLC (SEQ ID NO: 1473), EWCEYLGGYLRCYA (SEQ ID NO: 1474), YXCXXGPXTWXCXP (SEQ ID NO: 1475), IEGPTLRQWLAARA (SEQ ID NO: 1476), LWXXX (SEQ ID NO: 1477), XFXXYLW (SEQ ID NO: 1478), SSIISHFRWGLCD (SEQ ID NO: 1479), MSRPACPPNDKYE (SEQ ID NO: 1480), CLRSGRGC (SEQ ID NO: 1481), CHWMFSPWC (SEQ ID NO: 1482), WXXF (SEQ ID NO: 1483), CSSRLDAC (SEQ ID NO: 1484), CLPVASC (SEQ ID NO: 1485), CGFECVRQCPERC (SEQ ID NO: 1486), CVALCREACGEGC (SEQ ID NO: 1487), SWCEPGWCR (SEQ ID NO: 1488), YSGKWGW (SEQ ID NO: 1489), GLSGGRS (SEQ ID NO: 1490), LMLPRAD (SEQ ID NO: 1491), CSCFRDVCC (SEQ ID NO: 1492), CRDVVSVIC (SEQ ID NO: 1493), MARSGL (SEQ ID NO: 1494), MARAKE (SEQ ID NO: 1495), MSRTMS (SEQ ID NO: 1496, KCCYSL (SEQ ID NO: 1497), MYWGDSHWLQYWYE (SEQ ID NO: 1498), MQLPLAT (SEQ ID NO: 1499), EWLS (SEQ ID NO: 1500), SNEW (SEQ ID NO: 1501), TNYL (SEQ ID NO: 1502), WDLAWMFRLPVG (SEQ ID NO: 1503), CTVALPGGYVRVC (SEQ ID NO: 1504), CVAYCIEHHCWTC (SEQ ID NO: 1505), CVFAHNYDYLVC (SEQ ID NO: 1506), CVFTSNYAFC (SEQ ID NO: 1507), VHSPNKK (SEQ ID NO: 1508), CRGDGWC (SEQ ID NO: 1509), XRGCDX (SEQ ID NO: 1510), PXXX (SEQ ID NO: 1511), SGKGPRQITAL (SEQ ID NO: 1512), AAAAAAAAAXXXXX (SEQ ID NO: 1513), VYMSPF (SEQ ID NO: 1514), ATWLPPR (SEQ ID NO: 1515), HTMYYHHYQHHL (SEQ ID NO: 1516), SEVGCRAGPLQWLCEKYFG (SEQ ID NO: 1517), CGLLPVGRPDRNVWRWLC (SEQ ID NO: 1518), CKGQCDRFKGLPWEC (SEQ ID NO: 1519), SGRSA (SEQ ID NO: 1520), WGFP (SEQ ID NO: 1521), AEPMPHSLNFSQYLWYT (SEQ ID NO: 1522), WAYXSP (SEQ ID NO: 1523), IELLQAR (SEQ ID NO: 1524), AYTKCSRQWRTCMTTH (SEQ ID NO: 1525), PQNSKIPGPTFLDPH (SEQ ID NO: 1526), SMEPALPDWWWKMFK (SEQ ID NO: 1527), ANTPCGPYTHDCPVKR (SEQ ID NO: 1528), TACHQHVRMVRP (SEQ ID NO: 1529), VPWMEPAYQRFL (SEQ ID NO: 1530), DPRATPGS (SEQ ID NO: 1531), FRPNRAQDYNTN (SEQ ID NO: 1532), CTKNSYLMC (SEQ ID NO: 1533), CXXTXXXGXGC (SEQ ID NO: 1534), CPIEDRPMC (SEQ ID NO: 1535), HEWSYLAPYPWF (SEQ ID NO: 1536), MCPKHPLGC (SEQ ID NO: 1537), RMWPSSTVNLSAGRR (SEQ ID NO: 1538), SAKTAVSQRVWLPSHRGGEP (SEQ ID NO: 1539), KSREHVNNSACPSKRITAAL (SEQ ID NO: 1540), EGFR (SEQ ID NO: 1541), AGLGVR (SEQ ID NO: 1542), GTRQGHTMRLGVSDG (SEQ ID NO: 1543), IAGLATPGWSHWLAL (SEQ ID NO: 1544), SMSIARL (SEQ ID NO: 1545), HTFEPGV (SEQ ID NO: 1546), NTSLKRISNKRIRRK (SEQ ID NO: 1547), LRIKRKRRKRKKTRK (SEQ ID NO: 1548), GGG, GFS, LWS, EGG, LLV, LSP, LBS, AGG, GRR, GGH and GTV.

[0469] In some embodiments, the AAV serotype may be, or may have a sequence as described in United States Publication No. US 20160369298, the contents of which are herein incorporated by reference in their entirety, such as, but not limited to, site-specific mutated capsid protein of AAV2 (SEQ ID NO: 97 of US 20160369298; herein SEQ ID NO: 1549) or variants thereof, wherein the specific site is at least one site selected from sites R447, G453, S578, N587, N587+1, S662 of VP1 or fragment thereof.

[0470] Further, any of the mutated sequences described in US 20160369298, may be or may have, but not limited to, any of the following sequences SDSGASN (SEQ ID NO: 1550), SPSGASN (SEQ ID NO: 1551), SHSGASN (SEQ ID NO: 1552), SRSGASN (SEQ ID NO: 1553), SKSGASN (SEQ ID NO: 1554), SNSGASN (SEQ ID NO: 1555), SGSGASN (SEQ ID NO: 1556), SASGASN (SEQ ID NO: 1557), SESGTSN (SEQ ID NO: 1558), STTGGSN (SEQ ID NO: 1559), SSAGSTN (SEQ ID NO: 1560), NNDSQA (SEQ ID NO: 1561), NNRNQA (SEQ ID NO: 1562), NNNKQA (SEQ ID NO: 1563), NAKRQA (SEQ ID NO: 1564), NDEHQA (SEQ ID NO: 1565), NTSQKA (SEQ ID NO: 1566), YYLSRTNTPSGTDTQSRLVFSQAGA (SEQ ID NO: 1567), YYLSRTNTDSGTETQSGLDFSQAGA (SEQ ID NO: 1568), YYLSRTNTESGTPTQSALEFSQAGA (SEQ ID NO: 1569), YYLSRTNTHSGTHTQSPLHFSQAGA (SEQ ID NO: 1570), YYLSRTNTSSGTITISHLIFSQAGA (SEQ ID NO: 1571), YYLSRTNTRSGIMTKSSLMFSQAGA (SEQ ID NO: 1572), YYLSRTNTKSGRKTLSNLSFSQAGA (SEQ ID NO: 1573), YYLSRTNDGSGPVTPSKLRFSQRGA (SEQ ID NO: 1574), YYLSRTNAASGHATHSDLKFSQPGA (SEQ ID NO: 1575), YYLSRTNGQAGSLTMSELGFSQVGA (SEQ ID NO: 1576), YYLSRTNSTGGNQTTSQLLFSQLSA (SEQ ID NO: 1577), YFLSRTNNNTGLNTNSTLNFSQGRA (SEQ ID NO: 1578), SKTGADNNNSEYSWTG (SEQ ID NO: 1579), SKTDADNNNSEYSWTG (SEQ ID NO: 1580), SKTEADNNNSEYSWTG (SEQ ID NO: 1581), SKTPADNNNSEYSWTG (SEQ ID NO: 1582), SKTHADNNNSEYSWTG (SEQ ID NO: 1583), SKTQADNNNSEYSWTG (SEQ ID NO: 1584), SKTIADNNNSEYSWTG (SEQ ID NO: 1585), SKTMADNNNSEYSWTG (SEQ ID NO: 1586), SKTRADNNNSEYSWTG (SEQ ID NO: 1587), SKTNADNNNSEYSWTG (SEQ ID NO: 1588), SKTVGRNNNSEYSWTG (SEQ ID NO: 1589), SKTADRNNNSEYSWTG (SEQ ID NO: 1590), SKKLSQNNNSKYSWQG (SEQ ID NO: 1591), SKPTTGNNNSDYSWPG (SEQ ID NO: 1592), STQKNENNNSNYSWPG (SEQ ID NO: 1593), HKDDEGKF (SEQ ID NO: 1594), HKDDNRKF (SEQ ID NO: 1595), HKDDTNKF (SEQ ID NO: 1596), HEDSDKNF (SEQ ID NO: 1597), HRDGADSF (SEQ ID NO: 1598), HGDNKSRF (SEQ ID NO: 1599), KQGSEKTNVDFEEV (SEQ ID NO: 1600), KQGSEKTNVDSEEV (SEQ ID NO: 1601), KQGSEKTNVDVEEV (SEQ ID NO: 1602), KQGSDKTNVDDAGV (SEQ ID NO: 1603), KQGSSKTNVDPREV (SEQ ID NO: 1604), KQGSRKTNVDHKQV (SEQ ID NO: 1605), KQGSKGGNVDTNRV (SEQ ID NO: 1606), KQGSGEANVDNGDV (SEQ ID NO: 1607), KQDAAADNIDYDHV (SEQ ID NO: 1608), KQSGTRSNAAASSV (SEQ ID NO: 1609), KENTNTNDTELTNV (SEQ ID NO: 1610), QRGNNVAATADVNT (SEQ ID NO: 1611), QRGNNEAATADVNT (SEQ ID NO: 1612), QRGNNPAATADVNT (SEQ ID NO: 1613), QRGNNHAATADVNT (SEQ ID NO: 1614), QEENNIAATPGVNT (SEQ ID NO: 1615), QPPNNMAATHEVNT (SEQ ID NO: 1616), QHHNNSAATTIVNT (SEQ ID NO: 1617), QTTNNRAAFNMVET (SEQ ID NO: 1618), QKKNNNAASKKVAT (SEQ ID NO: 1619), QGGNNKAADDAVKT (SEQ ID NO: 1620), QAAKGGAADDAVKT (SEQ ID NO: 1621), QDDRAAAANESVDT (SEQ ID NO: 1622), QQQHDDAAYQRVHT (SEQ ID NO: 1623), QSSSSLAAVSTVQT (SEQ ID NO: 1624), QNNQTTAAIRNVTT (SEQ ID NO: 1625), NYNKKSDNVDFT (SEQ ID NO: 1626), NYNKKSENVDFT (SEQ ID NO: 1627), NYNKKSLNVDFT (SEQ ID NO: 1628), NYNKKSPNVDFT (SEQ ID NO: 1629), NYSKKSHCVDFT (SEQ ID NO: 1630), NYRKTIYVDFT (SEQ ID NO: 1631), NYKEKKDVHFT (SEQ ID NO: 1632), NYGHRAIVQFT (SEQ ID NO: 1633), NYANHQFVVCT (SEQ ID NO: 1634), NYDDDPTGVLLT (SEQ ID NO: 1635), NYDDPTGVLLT (SEQ ID NO: 1636), NFEQQNSVEWT (SEQ ID NO: 1637), SQSGASN (SEQ ID NO: 1638), NNGSQA (SEQ ID NO: 1639), YYLSRTNTPSGTTTWSRLQFSQAGA (SEQ ID NO: 1640), SKTSADNNNSEYSWTG (SEQ ID NO: 1641), HKDDEEKF (SEQ ID NO: 1642), KQGSEKTNVDIEEV (SEQ ID NO: 1643), QRGNNQAATADVNT (SEQ ID NO: 1644), NYNKKSVNVDFT (SEQ ID NO: 1645), SQSGASNYNTPSGTTTQSRLQFSTSADNNNSEYSWTGATKYH (SEQ ID NO: 1646), SASGASNFNSEGGSLTQSSLGFSTDGENNNSDFSWTGATKYH (SEQ ID NO: 1647), SQSGASNYNTPSGTTTQSRLQFSTDGENNNSDFSWTGATKYH (SEQ ID NO: 1648), SASGASNYNTPSGTTTQSRLQFSTSADNNNSEFSWPGATTYH (SEQ ID NO: 1649), SQSGASNFNSEGGSLTQSSLGFSTDGENNNSDFSWTGATKYH (SEQ ID NO: 1650), SASGASNYNTPSGSLTQSSLGFSTDGENNNSDFSWTGATKYH (SEQ ID NO: 1651), SQSGASNYNTPSGTTTQSRLQFSTSADNNNSDFSWTGATKYH (SEQ ID NO: 1652), SGAGASNFNSEGGSLTQSSLGFSTDGENNNSDFSWTGATKYH (SEQ ID NO: 1653), SGAGASN (SEQ ID NO: 1654), NSEGGSLTQSSLGFS (SEQ ID NO: 1655), TDGENNNSDFS (SEQ ID NO: 1656), SEFSWPGATT (SEQ ID NO: 1657), TSADNNNSDFSWT (SEQ ID NO: 1658), SQSGASNY (SEQ ID NO: 1659), NTPSGTTTQSRLQFS (SEQ ID NO: 1660), TSADNNNSEYSWTGATKYH (SEQ ID NO: 1661), SASGASNF (SEQ ID NO: 1662), TDGENNNSDFSWTGATKYH (SEQ ID NO: 1663), SASGASNY (SEQ ID NO: 1664), TSADNNNSEFSWPGATTYH (SEQ ID NO: 1665), NTPSGSLTQSSLGFS (SEQ ID NO: 1666), TSADNNNSDFSWTGATKYH (SEQ ID NO: 1667), SGAGASNF (SEQ ID NO: 1668), CTCCAGVVSVVSMRSRVCVNSGCAGCTDHCVVSRNSGTCVMSACACAA (SEQ ID NO: 1669), CTCCAGAGAGGCAACAGACAAGCAGCTACCGCAGATGTCAACACACAA (SEQ ID NO: 1670), SAAGASN (SEQ ID NO: 1671), YFLSRTNTESGSTTQSTLRFSQAG (SEQ ID NO: 1672), SKTSADNNNSDFS (SEQ ID NO: 1673), KQGSEKTDVDIDKV (SEQ ID NO: 1674), STAGASN (SEQ ID NO: 1675), YFLSRTNTTSGIETQSTLRFSQAG (SEQ ID NO: 1676), SKTDGENNNSDFS (SEQ ID NO: 1677), KQGAAADDVEIDGV (SEQ ID NO: 1678), SEAGASN (SEQ ID NO: 1679), YYLSRTNTPSGTTTQSRLQFSQAG (SEQ ID NO: 1680), SKTSADNNNSEYS (SEQ ID NO: 1681), KQGSEKTNVDIEKV (SEQ ID NO: 1682), YFLSRTNDASGSDTKSTLLFSQAG (SEQ ID NO: 1683), STTPSENNNSEYS (SEQ ID NO: 1684), SAAGATN (SEQ ID NO: 1685), YFLSRTNGEAGSATLSELRFSQAG (SEQ ID NO: 1686), HGDDADRF (SEQ ID NO: 1687), KQGAEKSDVEVDRV (SEQ ID NO: 1688), KQDSGGDNIDIDQV (SEQ ID NO: 1689), SDAGASN (SEQ ID NO: 1690), YFLSRTNTEGGHDTQSTLRFSQAG (SEQ ID NO: 1691), KEDGGGSDVAIDEV (SEQ ID NO: 1692), SNAGASN (SEQ ID NO: 1693), and YFLSRTNGEAGSATLSELRFSQPG (SEQ ID NO: 1694). Non-limiting examples of nucleotide sequences that may encode the amino acid mutated sites include the following, SEQ ID NO: 1695, SEQ ID NO: 1696, SEQ ID NO: 1697, SEQ ID NO: 1698, SEQ ID NO: 1699, SEQ ID NO: 1700, SEQ ID NO: 1701, SEQ ID NO: 1702, SEQ ID NO: 1703, SEQ ID NO: 1704, SEQ ID NO: 1705, SEQ ID NO: 1706, SEQ ID NO: 1707, SEQ ID NO: 1708, SEQ ID NO: 1709, SEQ ID NO: 1710, AGCAGGAGCTCCTTGGCCTCAGCGTGCGAG (SEQ ID NO: 264 of US20160369298; herein SEQ ID NO: 1711), SEQ ID NO: 1712, SEQ ID NO: 1713, SEQ ID NO: 1714, SEQ ID NO: 1715, SEQ ID NO: 1716, and SEQ ID NO: 1717.

[0471] In some embodiments, the AAV serotype may comprise an ocular cell targeting peptide as described in International Patent Publication WO2016134375, the contents of which are herein incorporated by reference in their entirety, such as, but not limited to SEQ ID NO: 9, and SEQ ID NO:10 of WO2016134375. Further, any of the ocular cell targeting peptides or amino acids described in WO2016134375, may be inserted into any parent AAV serotype, such as, but not limited to, AAV2 (SEQ ID NO:8 of WO2016134375; herein SEQ ID NO: 1718), or AAV9 (SEQ ID NO: 11 of WO2016134375; herein SEQ ID NO: 1719). In some embodiments, modifications, such as insertions are made in AAV2 proteins at P34-A35, T138-A139, A139-P140, G453-T454, N587-R588, and/or R588-Q589. In certain embodiments, insertions are made at D384, G385, 1560, T561, N562, E563, E564, E565, N704, and/or Y705 of AAV9. The ocular cell targeting peptide may be, but is not limited to, any of the following amino acid sequences, GSTPPPM (SEQ ID NO: 1 of WO2016134375; herein SEQ ID NO: 1720), or GETRAPL (SEQ ID NO: 4 of WO2016134375; herein SEQ ID NO: 1721).

[0472] In some embodiments, the AAV serotype may be modified as described in the United States Publication US 20170145405 the contents of which are herein incorporated by reference in their entirety. AAV serotypes may include, modified AAV2 (e.g., modifications at Y444F, Y500F, Y730F and/or S662V), modified AAV3 (e.g., modifications at Y705F, Y731F and/or T492V), and modified AAV6 (e.g., modifications at S663V and/or T492V).

[0473] In some embodiments, the AAV serotype may be modified as described in the International Publication WO2017083722 the contents of which are herein incorporated by reference in their entirety. AAV serotypes may include, AAV1 (Y705+731F+T492V), AAV2 (Y444+500+730F+T491V), AAV3 (Y705+731F), AAV5, AAV 5(Y436+693+719F), AAV6 (VP3 variant Y705F/Y731F/T492V), AAV8 (Y733F), AAV9, AAV9 (VP3 variant Y731F), and AAV10 (Y733F).

[0474] In some embodiments, the AAV serotype may comprise, as described in International Patent Publication WO2017015102, the contents of which are herein incorporated by reference in their entirety, an engineered epitope comprising the amino acids SPAKFA (SEQ ID NO: 24 of WO2017015102; herein SEQ ID NO: 1722) or NKDKLN (SEQ ID NO:2 of WO2017015102; herein SEQ ID NO: 1723). The epitope may be inserted in the region of amino acids 665 to 670 based on the numbering of the VP1 capsid of AAV8 (SEQ ID NO: 3 of WO2017015102) and/or residues 664 to 668 of AAV3B (SEQ ID NO: 3).

[0475] In some embodiments, the AAV serotype may be, or may have a sequence as described in International Patent Publication WO2017058892, the contents of which are herein incorporated by reference in their entirety, such as, but not limited to, AAV variants with capsid proteins that may comprise a substitution at one or more (e.g., 2, 3, 4, 5, 6, or 7) of amino acid residues 262-268, 370-379, 451-459, 472-473, 493-500, 528-534, 547-552, 588-597, 709-710, 716-722 of AAV1, in any combination, or the equivalent amino acid residues in AAV2, AAV3, AAV4, AAV5, AAV6, AAV7, AAV8, AAV9, AAV10, AAV11, AAV12, AAVrh8, AAVrh10, AAVrh32.33, bovine AAV or avian AAV. The amino acid substitution may be, but is not limited to, any of the amino acid sequences described in WO2017058892. In some embodiments, the AAV may comprise an amino acid substitution at residues 256L, 258K, 259Q, 261S, 263A, 264S, 265T, 266G, 272H, 385S, 386Q, S472R, V473D, N500E 547S, 709A, 710N, 716D, 717N, 718N, 720L, A456T, Q457T, N458Q, K459S, T492S, K493A, S586R, S587G, S588N, T589R and/or 722T of AAV1 (SEQ ID NO: 1 of WO2017058892) in any combination, 244N, 246Q, 248R, 249E, 2501, 251K, 252S, 253G, 254S, 255V, 256D, 263Y, 377E, 378N, 453L, 456R, 532Q, 533P, 535N, 536P, 537G, 538T, 539T, 540A, 541T, 542Y, 543L, 546N, 653V, 654P, 656S, 697Q, 698F, 704D, 705S, 706T, 707G, 708E, 709Y and/or 710R of AAV5 (SEQ ID NO:5 of WO2017058892) in any combination, 248R, 316V, 317Q, 318D, 319S, 443N, 530N, 531S, 532Q 533P, 534A, 535N, 540A, 541 T, 542Y, 543L, 545G, 546N, 697Q, 704D, 706T, 708E, 709Y and/or 710R of AAV5 (SEQ ID NO: 5 of WO2017058892) in any combination, 264S, 266G, 269N, 272H, 457Q, 588S and/or 5891 of AAV6 (SEQ ID NO:6 of WO2017058892) in any combination, 457T, 459N, 496G, 499N, 500N, 589Q, 590N and/or 592A of AAV8 (SEQ ID NO: 8 of WO2017058892) in any combination, 451I, 452N, 453G, 454S, 455G, 456Q, 457N and/or 458Q of AAV9 (SEQ ID NO: 9 of WO2017058892) in any combination.

[0476] In some embodiments, the AAV may include a sequence of amino acids at positions 155, 156 and 157 of VP1 or at positions 17, 18, 19 and 20 of VP2, as described in International Publication No. WO 2017066764, the contents of which are herein incorporated by reference in their entirety. The sequences of amino acid may be, but not limited to, N-S-S, S-X-S, S-S-Y, N-X-S, N-S-Y, S-X-Y and N-X-Y, where N, X and Y are, but not limited to, independently non-serine, or non-threonine amino acids, wherein the AAV may be, but not limited to AAV1, AAV2, AAV3, AAV4, AAV5, AAV6, AAV7, AAV8, AAV9, AAV10, AAV11 and AAV12. In some embodiments, the AAV may include a deletion of at least one amino acid at positions 156, 157 or 158 of VP1 or at positions 19, 20 or 21 of VP2, wherein the AAV may be, but not limited to AAV1, AAV2, AAV3, AAV4, AAV5, AAV6, AAV7, AAV8, AAV9, AAV10, AAV11 and AAV12.

[0477] In some embodiments, the AAV may be a serotype generated by Cre-recombination-based AAV targeted evolution (CREATE) as described by Deverman et al., (Nature Biotechnology 34(2):204-209 (2016)), the contents of which are herein incorporated by reference in their entirety. In some embodiments, AAV serotypes generated in this manner have improved CNS transduction and/or neuronal and astrocytic tropism, as compared to other AAV serotypes. As non-limiting examples, the AAV serotype may include a peptide such as, but not limited to, PHP.B, PHP.B2, PHP.B3, PHP.A, PHP.S, G2A12, G2A15, G2A3, G2B4, and G2B5. In some embodiments, these AAV serotypes may be AAV9 (SEQ ID NO: 11 or 138) derivatives with a 7-amino acid insert between amino acids 588-589. Non-limiting examples of these 7-amino acid inserts include TLAVPFK (PHP.B; SEQ ID NO: 1262), SVSKPFL (PHP.B2; SEQ ID NO: 1270), FTLTTPK (PHP.B3; SEQ ID NO: 1271), YTLSQGW (PHP.A; SEQ ID NO: 1277), QAVRTSL (PHP.S; SEQ ID NO: 1321), LAKERLS (G2A3; SEQ ID NO: 1322), MNSTKNV (G2B4; SEQ ID NO: 1323), and/or VSGGHHS (G2B5; SEQ ID NO: 1324).

[0478] In some embodiments, the AAV serotype may be as described in Jackson et al. (Frontiers in Molecular Neuroscience 9:154 (2016)), the contents of which are herein incorporated by reference in their entirety. In some embodiments, the AAV serotype is PHP.B or AAV9. In some embodiments, the AAV serotype is paired with a synapsin promoter to enhance neuronal transduction, as compared to when more ubiquitous promoters are used (i.e., CBA or CMV).

[0479] In some embodiments, the AAV serotype is a serotype comprising the AAVPHP.N (PHP.N) peptide, or a variant thereof. In some embodiments the AAV serotype is a serotype comprising the AAVPHP.B (PHP.B) peptide, or a variant thereof. In some embodiments, the AAV serotype is a serotype comprising the AAVPHP.A (PHP.A) peptide, or a variant thereof. In some embodiments, the AAV serotype is a serotype comprising the PHP.S peptide, or a variant thereof. In some embodiments, the AAV serotype is a serotype comprising the PHP.B2 peptide, or a variant thereof. In some embodiments, the AAV serotype is a serotype comprising the PHP.B3 peptide, or a variant thereof. In some embodiments, the AAV serotype is a serotype comprising the G2B4 peptide, or a variant thereof. In some embodiments, the AAV serotype is a serotype comprising the G2B5 peptide, or a variant thereof. In some embodiments the AAV serotype is VOY101, or a variant thereof. In some embodiments, the AAV serotype is VOY201, or a variant thereof.

[0480] In some embodiments the AAV serotype of an AAV particle, e.g., an AAV particle for the vectorized delivery of an NPC1 protein described herein, is AAV9, or a variant thereof. In some embodiments, the AAV particle, e.g., a recombinant AAV particle described herein, comprises an AAV9 capsid protein. In some embodiments, the AAV9 capsid protein comprises the amino acid sequence of SEQ ID NO: 138. In some embodiments, the nucleic acid sequence encoding the AAV9 capsid protein comprises the nucleotide sequence of SEQ ID NO: 137. In some embodiments, the AAV9 capsid protein comprises an amino acid sequence at least 70% identical to SEQ ID NO: 138, such as, 70%, 75%, 80%, 85%, 90%, 91%, 92%, 93%, 94%, 95%, 96%, 97%, 98%, 99%, or greater than 99%. In some embodiments, the nucleic acid sequence encoding the AAV9 capsid protein comprises a nucleotide sequence at least 70% identical to SEQ ID NO: 137, such as, 70%, 75%, 80%, 85%, 90%, 91%, 92%, 93%, 94%, 95%, 96%, 97%, 98%, 99%, or greater than 99%.

[0481] In some embodiments, the capsid protein comprises the amino acid sequence of SEQ ID NO: 11 or an amino acid sequence substantially identical (e.g., having at least 70%, 75%, 80%, 85%, 90%, 92%, 95%, 97%, 98%, or 99% sequence identity) thereto. In some embodiments the capsid protein comprises an amino acid sequence comprising at least one, two, or three modifications but no more than 30, 20, or 10 modifications, e.g., substitutions, relative to the amino acid sequence of SEQ ID NO: 11, optionally provided that position 449 does not comprise K, e.g., is R.

[0482] In some embodiments, the capsid protein, comprises the amino acid sequence of SEQ ID NO: 1 or an amino acid sequence substantially identical (e.g., having at least 70%, 75%, 80%, 85%, 90%, 92%, 95%, 97%, 98%, or 99% sequence identity) thereto. In some embodiments the capsid protein comprises an amino acid sequence comprising at least one, two, or three modifications but no more than 30, 20, or 10 modifications, e.g., substitutions, relative to the amino acid sequence of SEQ ID NO: 1. In some embodiments, the capsid protein comprises an amino acid sequence encoded by the nucleotide sequence of SEQ ID NO: 2 or a nucleotide sequence substantially identical (e.g., having at least 70%, 75%, 80%, 85%, 90%, 92%, 95%, 97%, 98%, or 99% sequence identity) thereto. In some embodiments, the nucleotide sequence encoding the capsid protein comprises the nucleotide sequence of SEQ ID NO: 2 or a sequence substantially identical (e.g., having at least 70%, 75%, 80%, 85%, 90%, 92%, 95%, 97%, 98%, or 99% sequence identity) thereto.

[0483] In some embodiments, the capsid protein, e.g., an AAV9 capsid protein, comprises the amino acid sequence of SEQ ID NO: 138 or an amino acid sequence substantially identical (e.g., having at least 70%, 75%, 80%, 85%, 90%, 92%, 95%, 97%, 98%, or 99% sequence identity) thereto. In some embodiments the capsid protein comprises an amino acid sequence comprising at least one, two, or three modifications but no more than 30, 20, or 10 modifications, e.g., substitutions, relative to the amino acid sequence of SEQ ID NO: 138. In some embodiments, the capsid protein comprises an amino acid sequence encoded by the nucleotide sequence of SEQ ID NO: 137 or a nucleotide sequence substantially identical (e.g., having at least 70%, 75%, 80%, 85%, 90%, 92%, 95%, 97%, 98%, or 99% sequence identity) thereto. In some embodiments, the nucleotide sequence encoding the capsid protein comprises the nucleotide sequence of SEQ ID NO: 137 or a nucleotide sequence substantially identical (e.g., having at least 70%, 75%, 80%, 85%, 90%, 92%, 95%, 97%, 98%, or 99% sequence identity) thereto. In some embodiments, the capsid protein comprises substitution at position K449, e.g., a K449R substitution, numbered according to SEQ ID NO: 138.

[0484] In some embodiments, the capsid protein comprises an insert comprising the amino acid sequence of TLAVPFK (SEQ ID NO: 1262). In some embodiments, the insert is present immediately subsequent to position 588, relative to a reference sequence numbered according to SEQ ID NO: 138. In some embodiments, the capsid protein comprises the amino acid substitutions of A587D and Q588G, numbered according to SEQ ID NO: 138.

[0485] In some embodiments, the capsid protein comprises the amino acid substitution of K449R, numbered according to SEQ ID NO: 138; and an insert comprising the amino acid sequence of TLAVPFK (SEQ ID NO: 1262), wherein the insert is present immediately subsequent to position 588, relative to a reference sequence numbered according to SEQ ID NO: 138.

[0486] In some embodiments, the capsid protein comprises the amino acid substitution of K449R, numbered according to SEQ ID NO: 138; an insert comprising the amino acid sequence of TLAVPFK (SEQ ID NO: 1262), wherein the insert is present immediately subsequent to position 588, relative to a reference sequence numbered according to SEQ ID NO: 138; and the amino acid substitutions of A587D and Q588G, numbered according to SEQ ID NO: 138.

[0487] In some embodiments, the capsid protein comprises an insert comprising the amino acid sequence of TLAVPFK (SEQ ID NO: 1262), wherein the insert is present immediately subsequent to position 588, relative to a reference sequence numbered according to SEQ ID NO: 138; and the amino acid substitutions of A587D and Q588G, numbered according to SEQ ID NO: 138.

[0488] In some embodiments, the AAV serotype of the AAV particle, e.g., an AAV particle for the vectorized delivery of antibody molecule described herein (e.g., an anti-beta-amyloid antibody molecule), is an AAV9 K449R, or a variant thereof. In some embodiments, the AAV particle comprises an AAV9 K449 capsid protein. In some embodiments, the AAV9 K449R capsid protein comprises the amino acid sequence of SEQ ID NO: 11. In some embodiments, the AAV9 K449R capsid protein comprises an amino acid sequence at least 70% identical to SEQ ID NO: 11, such as, 70%, 75%, 80%, 85%, 90%, 91%, 92%, 93%, 94%, 95%, 96%, 97%, 98%, 99%, or greater than 99%.

[0489] In some embodiments, the AAV capsid of an AAV particle, e.g., an AAV particle for the vectorized delivery of an NPC1 protein described herein, allows for blood brain barrier penetration following intravenous administration. Non-limiting examples of such AAV capsids include AAV9, AAV9 K449R, VOY101, VOY201, or AAV capsids comprising a peptide insert such as, but not limited to, AAVPHP.N (PHP.N), AAVPHP.B (PHP.B), PHP.S, G2A3, G2B4, G2B5, G2A12, G2A15, PHP.B2, PHP.B3, AAV2.BR1, or AAVPHP.A (PHP.A).

[0490] In some embodiments, the AAV capsid has increased tropism for cells of the central nervous system. In some embodiments, the cells of the central nervous system are neurons. In another embodiment, the cells of the central nervous system are astrocytes.

[0491] In some embodiments, the AAV serotype has increased tropism for cells (e.g., neurons) in brain regions such as cortex, cerebellum, corpus callosum, and/or brain stem.

[0492] In some embodiments, the AAV capsid has increased tropism for cells in the liver (hepatic cells).

[0493] In some embodiments, the AAV capsid has increased tropism for cells of the muscle(s).

[0494] In certain embodiments, an AAV particle described herein comprises an AAV capsid from a first AAV serotype (e.g., an AAV9 serotype) and the viral genome of said AAV particle comprises an inverted terminal repeat from a second AAV serotype (e.g., an AAV2 serotype), wherein the first AAV serotype is different from the second AAV serotype.

[0495] In some embodiments, the initiation codon for translation of the AAV VP1 capsid protein may be CTG, TTG, or GTG as described in U.S. Pat. No. 8,163,543, the contents of which are herein incorporated by reference in their entirety. In some embodiments, the nucleotide sequence encoding the capsid protein, e.g., a VP1 capsid protein, comprises 3-20 mutations (e.g., substitutions), e.g., 3-15 mutations, 3-10 mutations, 3-5 mutations, 5-20 mutations, 5-15 mutations, 5-10 mutations, 10-20 mutations, 10-15 mutations, 15-20 mutations, 3 mutations, 5 mutations, 10 mutations, 12 mutations, 15 mutations, 18 mutations, or 20 mutations, relative to the nucleotide sequence of SEQ ID NO: 137.

[0496] The present disclosure refers to structural capsid proteins (including VP1, VP2 and VP3) which are encoded by capsid (Cap) genes. These capsid proteins form an outer protein structural shell (i.e. capsid) of a viral vector such as AAV. VP capsid proteins synthesized from Cap polynucleotides generally include a methionine as the first amino acid in the peptide sequence (Met1), which is associated with the start codon (AUG or ATG) in the corresponding Cap nucleotide sequence. However, it is common for a first-methionine (Met1) residue or generally any first amino acid (AA1) to be cleaved off after or during polypeptide synthesis by protein processing enzymes such as Met-aminopeptidases. This “Met/AA-clipping” process often correlates with a corresponding acetylation of the second amino acid in the polypeptide sequence (e.g., alanine, valine, serine, threonine, etc.). Met-clipping commonly occurs with VP1 and VP3 capsid proteins but can also occur with VP2 capsid proteins.

[0497] Where the Met/AA-clipping is incomplete, a mixture of one or more (one, two or three) VP capsid proteins comprising the viral capsid may be produced, some of which may include a Met1/AA1 amino acid (Met+/AA+) and some of which may lack a Met1/AA1 amino acid as a result of Met/AA-clipping (Met−/AA−). For further discussion regarding Met/AA-clipping in capsid proteins, see Jin, et al. Direct Liquid Chromatography/Mass Spectrometry Analysis for Complete Characterization of Recombinant Adeno-Associated Virus Capsid Proteins. Hum Gene Ther Methods. 2017 Oct. 28(5):255-267; Hwang, et al. N-Terminal Acetylation of Cellular Proteins Creates Specific Degradation Signals. Science. 2010 Feb. 19. 327(5968): 973-977; the contents of which are each incorporated herein by reference in their entirety.

[0498] According to the present disclosure, references to capsid proteins is not limited to either clipped (Met−/AA−) or unclipped (Met+/AA+) and may, in context, refer to independent capsid proteins, viral capsids comprised of a mixture of capsid proteins, and/or polynucleotide sequences (or fragments thereof) which encode, describe, produce or result in capsid proteins of the present disclosure. A direct reference to a “capsid protein” or “capsid polypeptide” (such as VP1, VP2 or VP2) may also comprise VP capsid proteins which include a Met1/AA1 amino acid (Met+/AA+) as well as corresponding VP capsid proteins which lack the Met1/AA1 amino acid as a result of Met/AA-clipping (Met−/AA−).

[0499] Further according to the present disclosure, a reference to a specific “SEQ ID NO:” (whether a protein or nucleic acid) which comprises or encodes, respectively, one or more capsid proteins which include a Met1/AA1 amino acid (Met+/AA+) should be understood to teach the VP capsid proteins which lack the Met1/AA1 amino acid as upon review of the sequence, it is readily apparent any sequence which merely lacks the first listed amino acid (whether or not Met1/AA1).

[0500] As a non-limiting example, reference to a VP1 polypeptide sequence which is 736 amino acids in length and which includes a “Met1” amino acid (Met+) encoded by the AUG/ATG start codon may also be understood to teach a VP1 polypeptide sequence which is 735 amino acids in length and which does not include the “Met1” amino acid (Met−) of the 736 amino acid Met+ sequence. As a second non-limiting example, reference to a VP1 polypeptide sequence which is 736 amino acids in length and which includes an “AA1” amino acid (AA1+) encoded by any NNN initiator codon may also be understood to teach a VP1 polypeptide sequence which is 735 amino acids in length and which does not include the “AA1” amino acid (AA1−) of the 736 amino acid AA1+ sequence.

[0501] References to viral capsids formed from VP capsid proteins (such as reference to specific AAV capsid serotypes), can incorporate VP capsid proteins which include a Met1/AA1 amino acid (Met+/AA1+), corresponding VP capsid proteins which lack the Met1/AA1 amino acid as a result of Met/AA1-clipping (Met−/AA1−), and combinations thereof (Met+/AA1+ and Met−/AA1−).

[0502] As a non-limiting example, an AAV capsid serotype can include VP1 (Met+/AA1+), VP1 (Met−/AA1−), or a combination of VP1 (Met+/AA1+) and VP1 (Met−/AA1−). An AAV capsid serotype can also include VP3 (Met+/AA1+), VP3 (Met−/AA1−), or a combination of VP3 (Met+/AA1+) and VP3 (Met−/AA1−); and can also include similar optional combinations of VP2 (Met+/AA1) and VP2 (Met−/AA1−).

### AAV Viral Genome

[0503] In some aspects, the AAV particle of the present disclosure serves as an expression vector comprising a viral genome which encodes NPC protein. Expression vectors are not limited to AAV and may be adenovirus, retrovirus, lentivirus, plasmid, vector, or any variant thereof.

[0504] In some embodiments, an AAV particle, e.g., an AAV particle for the vectorized delivery of an NPC1 protein described herein, comprises a viral genome, e.g., an AAV viral genome (e.g., a vector genome or AAV vector genome). In some embodiments, the viral genome, e.g., the AAV viral genome, further comprises an inverted terminal repeat (ITR) region, a promoter, an enhancer, an intron region, a Kozak sequence, an exon region, a nucleic acid encoding a transgene encoding a payload (e.g., an NPC1 protein described herein), a poly A signal region, or a combination thereof. In some embodiments, an AAV particle viral genome described herein may comprise, from ITR to ITR recited 5′ to 3′, an ITR, a promoter, an intron, a nucleic acid sequence encoding NPC protein, a polyA sequence, and an ITR.

### Viral Genome Component: Inverted Terminal Repeats (ITRs)

[0505] In some embodiments, the viral genome may comprise at least one inverted terminal repeat (ITR) region. In some embodiments, the AAV particles of the present disclosure comprise a viral genome with at least one ITR region and a payload region. In some embodiments, the viral genome has two ITRs. These two ITRs flank the payload region at the 5′ and 3′ ends. The ITRs function as origins of replication comprising recognition sites for replication. ITRs comprise sequence regions which can be complementary and symmetrically arranged. ITRs incorporated into viral genomes may be comprised of naturally occurring polynucleotide sequences or recombinantly derived polynucleotide sequences.

[0506] The ITRs may be derived from the same serotype as the capsid, selected from any of the serotypes listed in Table 1, or a derivative thereof. The ITR may be of a different serotype than the capsid. In some embodiments, the AAV particle has more than one ITR. In a non-limiting example, the AAV particle has a viral genome comprising two ITRs. In some embodiments, the ITRs are of the same serotype as one another. In another embodiment, the ITRs are of different serotypes. Non-limiting examples include zero, one or both of the ITRs having the same serotype as the capsid. In some embodiments both ITRs of the viral genome of the AAV particle are AAV2 ITRs.

[0507] Independently, each ITR may be about 100 to about 150 nucleotides in length. In some embodiments, the ITR comprises 100-180 nucleotides in length, e.g., about 100-115, about 100-120, about 100-130, about 100-140, about 100-150, about 100-160, about 100-170, about 100-180, about 110-120, about 110-130, about 110-140, about 110-150, about 110-160, about 110-170, about 110-180, about 120-130, about 120-140, about 120-150, about 120-160, about 120-170, about 120-180, about 130-140, about 130-150, about 130-160, about 130-170, about 130-180, about 140-150, about 140-160, about 140-170, about 140-180, about 150-160, about 150-170, about 150-180, about 160-170, about 160-180, or about 170-180 nucleotides in length. In some embodiments, the ITR comprises about 120-140 nucleotides in length, e.g., about 130 nucleotides in length. In some embodiments, the ITRs are 140-142 nucleotides in length, e.g., 141 nucleotides in length. In some embodiments, the ITR comprises 1205-135 nucleotides in length, e.g., 130 nucleotides in length. Non-limiting examples of ITR length are 102, 130, 140, 141, 142, 145 nucleotides in length, and those having at least 95% identity thereto.

[0508] In some embodiments, each ITR may be 141 nucleotides in length.

[0509] In some embodiments, each ITR may be 130 nucleotides in length.

[0510] In some embodiments, the viral genome of an AAV particle described herein comprises two ITRs, wherein one ITR is 141 nucleotides in length and the other ITR is 130 nucleotides in length.

### Viral Genome Component: Promoters and Expression Enhancers

[0511] In some embodiments, the payload region of the viral genome comprises at least one element to enhance the transgene target specificity and expression. See, e.g., Powell et al. Viral Expression Cassette Elements to Enhance Transgene Target Specificity and Expression in Gene Therapy, 2015; the contents of which are herein incorporated by reference in their entirety. Non-limiting examples of elements to enhance the transgene target specificity and expression include promoters, endogenous miRNAs, post-transcriptional regulatory elements (PREs), polyadenylation (PolyA) signal sequences, upstream enhancers (USEs), CMV enhancers, and introns. In some embodiments, the viral genome comprises a promoter operably linked to a transgene encoded by a nucleic acid molecule encoding a payload, e.g., an NPC1 protein. In some embodiments, the viral genome comprises an enhancer, e.g., a CMVie enhancer.

[0512] In some embodiments, expression of the polypeptides in a target cell may be driven by a specific promoter, including but not limited to, a promoter that is species specific, inducible, tissue-specific, or cell cycle-specific (Parr et al., Nat. Med. 3:1145-9 (1997); the contents of which are herein incorporated by reference in their entirety).

[0513] In some embodiments, the viral genome comprises a promoter that is sufficient for expression, e.g., in a target cell, of a payload (e.g., an NPC1 protein) encoded by a transgene. In some embodiments, the promoter is deemed to be efficient when it drives expression of the polypeptide(s) encoded in the payload region of the viral genome of the AAV particle.

[0514] In some embodiments, the promoter is a promoter deemed to be efficient when it drives expression in the cell or tissue being targeted.

[0515] In some embodiments, the promoter drives expression of the NPC protein(s) for a period of time in targeted cells, tissues, and/or organs. Expression driven by a promoter may be for a period of 1 hour, 2, hours, 3 hours, 4 hours, 5 hours, 6 hours, 7 hours, 8 hours, 9 hours, 10 hours, 11 hours, 12 hours, 13 hours, 14 hours, 15 hours, 16 hours, 17 hours, 18 hours, 19 hours, 20 hours, 21 hours, 22 hours, 23 hours, 1 day, 2 days, 3 days, 4 days, 5 days, 6 days, 1 week, 8 days, 9 days, 10 days, 11 days, 12 days, 13 days, 2 weeks, 15 days, 16 days, 17 days, 18 days, 19 days, 20 days, 3 weeks, 22 days, 23 days, 24 days, 25 days, 26 days, 27 days, 28 days, 29 days, 30 days, 31 days, 1 month, 2 months, 3 months, 4 months, 5 months, 6 months, 7 months, 8 months, 9 months, 10 months, 11 months, 1 year, 13 months, 14 months, 15 months, 16 months, 17 months, 18 months, 19 months, 20 months, 21 months, 22 months, 23 months, 2 years, 3 years, 4 years, 5 years, 6 years, 7 years, 8 years, 9 years, 10 years or more than 10 years. Expression may be for 1-5 hours, 1-12 hours, 1-2 days, 1-5 days, 1-2 weeks, 1-3 weeks, 1-4 weeks, 1-2 months, 1-4 months, 1-6 months, 2-6 months, 3-6 months, 3-9 months, 4-8 months, 6-12 months, 1-2 years, 1-5 years, 2-5 years, 3-6 years, 3-8 years, 4-8 years, or 5-10 years.

[0516] In some embodiments, the promoter drives expression of the polypeptides (e.g., NPC protein) for at least 1 month, 2 months, 3 months, 4 months, 5 months, 6 months, 7 months, 8 months, 9 months, 10 months, 11 months, 1 year, 2 years, 3 years 4 years, 5 years, 6 years, 7 years, 8 years, 9 years, 10 years, 11 years, 12 years, 13 years, 14 years, 15 years, 16 years, 17 years, 18 years, 19 years, 20 years, 21 years, 22 years, 23 years, 24 years, 25 years, 26 years, 27 years, 28 years, 29 years, 30 years, 31 years, 32 years, 33 years, 34 years, 35 years, 36 years, 37 years, 38 years, 39 years, 40 years, 41 years, 42 years, 43 years, 44 years, 45 years, 46 years, 47 years, 48 years, 49 years, 50 years, 55 years, 60 years, 65 years, or more than 65 years.

[0517] Promoters may be naturally occurring or non-naturally occurring. Non-limiting examples of promoters include viral promoters, plant promoters and mammalian promoters. In some embodiments, the promoters may be human promoters. In some embodiments, the promoter may be a truncated promoter.

[0518] In some embodiments, the viral genome comprises a promoter that results in expression in one or more, e.g., multiple, cells and/or tissues, e.g., a ubiquitous promoter. In some embodiments, promoters which drive or promote expression in most mammalian tissues include, but are not limited to, human elongation factor 1α-subunit (EF1α), cytomegalovirus (CMV) immediate-early enhancer and/or promoter, chicken j-actin (CBA) and its derivative CAG, β glucuronidase (GUSB), and ubiquitin C (UBC). In some embodiments, tissue-specific expression elements can be used to restrict expression to certain cell types such as, but not limited to, CNS-specific promoters, B cell promoters, monocyte promoters, leukocyte promoters, macrophage promoters, pancreatic acinar cell promoters, endothelial cell promoters, lung tissue promoters, astrocyte promoters, or various specific nervous system cell- or tissue-type promoters which can be used to restrict expression to neurons, astrocytes, or oligodendrocytes, for example.

[0519] In some embodiments, the viral genome comprises a nervous system specific promoter, e.g., a promoter that results in expression of a payload in a neuron, an astrocyte, and/or an oligodendrocyte. Non-limiting examples of tissue-specific expression elements for neurons include neuron-specific enolase (NSE), platelet-derived growth factor (PDGF), platelet-derived growth factor B-chain (PDGF-β), synapsin (Syn), synapsin 1 (Syn1), methyl-CpG binding protein 2 (MeCP2), Ca²⁺/calmodulin-dependent protein kinase II (CaMKII), metabotropic glutamate receptor 2 (mGluR2), neurofilament light (NFL) or heavy (NFH), 0-globin minigene nβ2, preproenkephalin (PPE), enkephalin (Enk) and excitatory amino acid transporter 2 (EAAT2) promoters. Non-limiting examples of tissue-specific expression elements for astrocytes include glial fibrillary acidic protein (GFAP) and EAAT2 promoters. A non-limiting example of a tissue-specific expression element for oligodendrocytes includes the myelin basic protein (MBP) promoter. Prion promoter represents an additional tissue specific promoter useful for driving protein expression in CNS tissue (see Loftus, Stacie K., et al. “Rescue of neurodegeneration in Niemann-Pick C mice by a prion-promoter-driven Npc1 cDNA transgene.” Human molecular genetics 11.24 (2002): 3107-3114, the disclosure of which is incorporated by reference in its entirety).

[0520] In some embodiments, the promoter may be less than 1 kb. The promoter may have a length of 200, 210, 220, 230, 240, 250, 260, 270, 280, 290, 300, 310, 320, 330, 340, 350, 360, 370, 380, 390, 400, 410, 420, 430, 440, 450, 460, 470, 480, 490, 500, 510, 520, 530, 540, 550, 560, 570, 580, 590, 600, 610, 620, 630, 640, 650, 660, 670, 680, 690, 700, 710, 720, 730, 740, 750, 760, 770, 780, 790, 800, or more than 800 nucleotides. The promoter may have a length between 200-300, 200-400, 200-500, 200-600, 200-700, 200-800, 300-400, 300-500, 300-600, 300-700, 300-800, 400-500, 400-600, 400-700, 400-800, 500-600, 500-700, 500-800, 600-700, 600-800, or 700-800 nucleotides.

[0521] In some embodiments, the promoter may be a combination of two or more components of the same or different starting or parental promoters such as, but not limited to, CMV and CBA. Each component may have a length of 200, 210, 220, 230, 240, 250, 260, 270, 280, 290, 300, 310, 320, 330, 340, 350, 360, 370, 380, 381, 382, 383, 384, 385, 386, 387, 388, 389, 390, 400, 410, 420, 430, 440, 450, 460, 470, 480, 490, 500, 510, 520, 530, 540, 550, 560, 570, 580, 590, 600, 610, 620, 630, 640, 650, 660, 670, 680, 690, 700, 710, 720, 730, 740, 750, 760, 770, 780, 790, 800, or more than 800 nucleotides. Each component may have a length between 200-300, 200-400, 200-500, 200-600, 200-700, 200-800, 300-400, 300-500, 300-600, 300-700, 300-800, 400-500, 400-600, 400-700, 400-800, 500-600, 500-700, 500-800, 600-700, 600-800 or 700-800 nucleotides. In some embodiments, the promoter is a combination of a 382 nucleotide CMV-enhancer sequence and a 260 nucleotide CBA-promoter sequence.

[0522] In some embodiments, the viral genome comprises a ubiquitous promoter. Non-limiting examples of ubiquitous promoters include CMV, CBA (including derivatives CAG, CB6, CBh, etc.), EF-1a, PGK, UBC, GUSB (hGBp), and UCOE (promoter of HNRPA2B1-CBX3). In some embodiments, the viral genome comprises an EF-1α promoter or EF-1α promoter variant, e.g., a truncated EF-1α promoter.

[0523] In some embodiments, the promoter is a ubiquitous promoter as described in Yu et al. (Molecular Pain 2011, 7:63), Soderblom et al. (E. Neuro 2015), Gill et al., (Gene Therapy 2001, Vol. 8, 1539-1546), and Husain et al. (Gene Therapy 2009), each of which are incorporated by reference in their entirety.

[0524] In some embodiments, the promoter is not cell specific.

[0525] In some embodiments, the promoter is a ubiquitin c (UBC) promoter. The UBC promoter may have a size of 300-350 nucleotides. As a non-limiting example, the UBC promoter is 332 nucleotides.

[0526] In some embodiments, the promoter is a 0-glucuronidase (GUSB) promoter. The GUSB promoter may have a size of 350-400 nucleotides. As a non-limiting example, the GUSB promoter is 378 nucleotides.

[0527] In some embodiments, the promoter is a neurofilament light (NFL) promoter. The NFL promoter may have a size of 600-700 nucleotides. As a non-limiting example, the NFL promoter is 650 nucleotides.

[0528] In some embodiments, the promoter is a neurofilament heavy (NFH) promoter. The NFH promoter may have a size of 900-950 nucleotides. As a non-limiting example, the NFH promoter is 920 nucleotides.

[0529] In some embodiments, the promoter is a scn8a promoter. The scn8a promoter may have a size of 450-500 nucleotides. As a non-limiting example, the scn8a promoter is 470 nucleotides.

[0530] In some embodiments, the promoter is a phosphoglycerate kinase 1 (PGK) promoter.

[0531] In some embodiments, the promoter is a chicken j-actin (CBA) promoter, or a variant thereof.

[0532] In some embodiments, the promoter is a CB6 promoter.

[0533] In some embodiments, the promoter is a minimal CB promoter.

[0534] In some embodiments, the promoter is a cytomegalovirus (CMV) promoter.

[0535] In some embodiments, the promoter is a CAG promoter.

[0536] In some embodiments, the promoter is a GFAP promoter to drive NPC protein expression in astrocytes, as described, for example, in Zhang, Min, et al. “Astrocyte-only Npc1 reduces neuronal cholesterol and triples life span of Npc1−/− mice.” Journal of neuroscience research 86.13 (2008): 2848-2856, the disclosure of which is incorporated by reference in its entirety.

[0537] In some embodiments, the promoter is a synapsin promoter.

[0538] In some embodiments, the promoter is an RNA pol III promoter. As a non-limiting example, the RNA pol III promoter is U6. As a non-limiting example, the RNA pol III promoter is H1.

[0539] In some embodiments, the viral genome comprises two promoters. As a non-limiting example, the promoters are an EF1α promoter and a CMV promoter.

[0540] In another embodiment, the viral genome comprises a promoter from a naturally expressed protein.

[0541] In some embodiments, the NPC1 and/or NPC2 promoter is used in the viral genomes of the AAV particles encoding NPC protein or a variant thereof. In some embodiments the NPC1 and/or NPC2 promoter is engineered for optimal NPC protein expression.

[0542] In some embodiments, the promoter promotes widespread NPC1 distribution throughout the periphery and CNS tissues (e.g., neurons) to provide robust efficacy.

[0543] In some embodiments, the viral genome comprises an enhancer element, a promoter and/or a 5′UTR intron. The enhancer element, also referred to herein as an “enhancer,” may be, but is not limited to, a CMV enhancer, the promoter may be, but is not limited to, a CMV, CBA, UBC, GUSB, NSE, Synapsin, MeCP2, and GFAP promoter and the 5′UTR/intron may be, but is not limited to, SV40, and CBA-MVM. As a non-limiting example, the enhancer, promoter and/or intron used in combination may be: (1) CMV enhancer, CMV promoter, SV40 5′UTR intron; (2) CMV enhancer, CBA promoter, SV 40 5′UTR intron; (3) CMV enhancer, CBA promoter, CBA-MVM 5′UTR intron; (4) UBC promoter; (5) GUSB promoter; (6) NSE promoter; (7) Synapsin promoter; (8) MeCP2 promoter; and (9) GFAP promoter.

### Viral Genome Component: Introns

[0544] In some embodiments, the viral genome comprises at least one intron or a fragment or derivative thereof. In some embodiments, the at least one intron may enhance expression of NPC protein (see e.g., Powell et al. Viral Expression Cassette Elements to Enhance Transgene Target Specificity and Expression in Gene Therapy, 2015; the contents of which are herein incorporated by reference in their entirety). Non-limiting examples of introns include, MVM (67-97 bps), F.IX truncated intron 1 (300 bps), β-globin SD/immunoglobulin heavy chain splice acceptor (250 bps), adenovirus splice donor/immunoglobin splice acceptor (500 bps), SV40 late splice donor/splice acceptor (19S/16S) (180 bps), and hybrid adenovirus splice donor/IgG splice acceptor (230 bps).

[0545] In some embodiments, the intron may be 100-500 nucleotides in length. The intron may have a length of 80, 90, 100, 110, 120, 130, 140, 150, 160, 170, 171, 172, 173, 174, 175, 176, 177, 178, 179, 180, 190, 200, 210, 220, 230, 240, 250, 260, 270, 280, 290, 300, 310, 320, 330, 340, 350, 360, 370, 380, 390, 400, 410, 420, 430, 440, 450, 460, 470, 480, 490 or 500 nucleotides. The intron may have a length between 80-100, 80-120, 80-140, 80-160, 80-180, 80-200, 80-250, 80-300, 80-350, 80-400, 80-450, 80-500, 200-300, 200-400, 200-500, 300-400, 300-500, or 400-500 nucleotides.

[0546] In some embodiments, the AAV viral genome may comprise an SV40 intron or fragment or variant thereof.

[0547] In some embodiments, the AAV viral genome may comprise one or more beta-globin introns or a fragment or variant thereof. In some embodiments, the intron comprises one or more human beta-globin sequences (e.g., including fragments/variants thereof).

[0548] In some embodiments, the encoded NPC protein may be located downstream of an intron (e.g., 3′ relative to the intron) in an expression vector or a viral genome described herein, such as, but not limited to, SV40 intron or beta globin intron or others known in the art. Further, the encoded NPC protein may also be located upstream of the polyadenylation sequence (e.g., 5′ relative to the polyadenylation sequence) in an expression vector or a viral genome described herein. In some embodiments, the encoded NPC protein may be located within 1, 2, 3, 4, 5, 6, 7, 8, 9, 10, 11, 12, 13, 14, 15, 16, 17, 18, 19, 20, 21, 22, 23, 24, 25, 26, 27, 28, 29, 30, or more than 30 nucleotides downstream from the promoter with an intron (e.g., 3′ relative to the promoter) and/or upstream of the polyadenylation sequence (e.g., 5′ relative to the polyadenylation sequence) in an expression vector or a viral genome described herein. In some embodiments, the encoded NPC protein may be located within 1-5, 1-10, 1-15, 1-20, 1-25, 1-30, 5-10, 5-15, 5-20, 5-25, 5-30, 10-15, 10-20, 10-25, 10-30, 15-20, 15-25, 15-30, 20-25, 20-30, or 25-30 nucleotides downstream from the intron (e.g., 3′ relative to the intron) and/or upstream of the polyadenylation sequence (e.g., 5′ relative to the polyadenylation sequence) in an expression vector or a viral genome described herein. In some embodiments, the encoded NPC protein may be located within the first 1%, 2%, 3%, 4%, 5%, 6%, 7%, 8%, 9%, 10%, 15%, 20%, 25%, or more than 25% of the nucleotides downstream from the intron and/or upstream of the polyadenylation sequence in an expression vector or a viral genome described herein. In some embodiments, the encoded NPC protein may be located within the first 1-5%, 1-10%, 1-15%, 1-20%, 1-25%, 5-10%, 5-15%, 5-20%, 5-25%, 10-15%, 10-20%, 10-25%, 15-20%, 15-25%, or 20-25% of the sequence downstream from the intron and/or upstream of the polyadenylation sequence in an expression vector or a viral genome described herein.

[0549] In some embodiments, the viral genome encoding an NPC1 protein described herein comprises a chimeric intron (e.g., a pClneo-intron). In some embodiments, the intron comprises the nucleotide sequence of:
[0550] gtaagtatcaaggttacaagacaggtttaaggagaccaatagaaactgggcttgtcgagacagagaagactcttgcgtttctgataggcacc tattggtcttactgacatccactttgcctttctctccacag (SEQ ID NO: 1780).

[0551] In some embodiments, the intron, e.g., the chimeric intron (e.g., a pClneo-intron), is located between the promoter and the transgene encoding the NPC1 protein. Without wishing to be bound by theory, it is believed in some embodiments, that the presence of an intron, e.g., a pClneo-intron, in a viral genome described herein enhances the expression of the encoded NPC1 protein.

[0552] In some embodiments, the intron sequence is not an enhancer sequence. In certain embodiments, the intron sequence is not a sub-component of a promoter sequence.

### Viral Genome Component: Untranslated Regions (UTRs)

[0553] In some embodiments, wild type untranslated regions (UTRs) of a gene are transcribed but not translated. Generally, the 5′ UTR starts at the transcription start site and ends at the start codon and the 3′ UTR starts immediately following the stop codon and continues until the termination signal for transcription.

[0554] Features typically found in abundantly expressed genes of specific target organs may be engineered into UTRs to enhance the stability and protein production. As a non-limiting example, a 5′ UTR from mRNA normally expressed in the liver (e.g., albumin, serum amyloid A, Apolipoprotein A/B/E, transferrin, alpha fetoprotein, erythropoietin, or Factor VIII) may be used in the viral genomes of the AAV particles of the disclosure to enhance expression in hepatic cell lines or liver.

[0555] In some embodiments, the viral genome encoding a transgene described herein (e.g., a transgene encoding an NPC1 protein) comprises a Kozak sequence. While not wishing to be bound by theory, wild-type 5′ untranslated regions (UTRs) include features that play roles in translation initiation. Kozak sequences, which are commonly known to be involved in the process by which the ribosome initiates translation of many genes, are usually included in 5′ UTRs. Kozak sequences have the consensus CCR(A/G)CCAUGG, where R is a purine (adenine or guanine) three bases upstream of the start codon (ATG), which is followed by another ‘G’.

[0556] In some embodiments, the 5′UTR in the viral genome includes a Kozak sequence.

[0557] In some embodiments, the 5′UTR in the viral genome does not include a Kozak sequence.

[0558] While not wishing to be bound by theory, wild-type 3′ UTRs are known to have stretches of adenosines and uridines embedded therein. These AU rich signatures are particularly prevalent in genes with high rates of turnover. Based on their sequence features and functional properties, the AU rich elements (AREs) can be separated into three classes (Chen et al., 1995, the contents of which are herein incorporated by reference in their entirety): Class I AREs, such as, but not limited to, c-Myc and MyoD, contain several dispersed copies of an AUUUA motif within U-rich regions. Class II AREs, such as, but not limited to, GM-CSF and TNF-α, possess two or more overlapping UUAUUUA(U/A)(U/A) nonamers. Class III ARES, such as, but not limited to, c-Jun and Myogenin, are less well defined. These U rich regions do not contain an AUUUA motif. Most proteins binding to the AREs are known to destabilize the messenger, whereas members of the ELAV family, most notably HuR, have been documented to increase the stability of mRNA. HuR binds to AREs of all the three classes. Engineering the HuR specific binding sites into the 3′ UTR of nucleic acid molecules will lead to HuR binding and thus, stabilization of the message in vivo.

[0559] Introduction, removal or modification of 3′ UTR AU rich elements (AREs) can be used to modulate the stability of polynucleotides. When engineering specific polynucleotides, e.g., payload regions of viral genomes, one or more copies of an ARE can be introduced to make polynucleotides less stable and thereby curtail translation and decrease production of the resultant protein. Likewise, AREs can be identified and removed or mutated to increase the intracellular stability and thus increase translation and production of the resultant protein.

[0560] In some embodiments, the 3′ UTR of the viral genome may include an oligo(dT) sequence for templated addition of a poly-A tail.

[0561] Any UTR from any gene known in the art may be incorporated into the viral genome of the AAV particle. These UTRs, or portions thereof, may be placed in the same orientation as in the gene from which they were selected or they may be altered in orientation or location. In some embodiments, the UTR used in the viral genome of the AAV particle may be inverted, shortened, lengthened, or made with one or more other 5′ UTRs or 3′ UTRs known in the art. As used herein, the term “altered,” as it relates to a UTR, means that the UTR has been changed in some way in relation to a reference sequence. For example, a 3′ or 5′ UTR may be altered relative to a wild type or native UTR by the change in orientation or location as taught above or may be altered by the inclusion of additional nucleotides, deletion of nucleotides, swapping or transposition of nucleotides.

[0562] In some embodiments, the viral genome of the AAV particle comprises at least one artificial UTR, which is not a variant of a wild type UTR.

[0563] In some embodiments, the viral genome of the AAV particle comprises UTRs which have been selected from a family of transcripts whose proteins share a common function, structure, feature, or property.

### Viral Genome Component: miR Binding Site

[0564] Tissue- or cell-specific expression of the AAV viral particles of the invention can be enhanced by introducing tissue- or cell-specific regulatory sequences, e.g., promoters, enhancers, microRNA binding sites, e.g., a detargeting site. Without wishing to be bound by theory, it is believed that an encoded miR binding site can modulate, e.g., prevent, suppress, or otherwise inhibit, the expression of a gene of interest on the viral genome of the invention, based on the expression of the corresponding endogenous microRNA (miRNA) or a corresponding controlled exogenous miRNA in a tissue or cell, e.g., a non-targeting cell or tissue. In some embodiments, a miR binding site modulates, e.g., reduces, expression of the payload encoded by a viral genome of an AAV particle described herein in a cell or tissue where the corresponding mRNA is expressed.

[0565] In some embodiments, the viral genome of an AAV particle described herein comprises a nucleotide sequence encoding a microRNA binding site, e.g., a detargeting site. In some embodiments, the viral genome of an AAV particle described herein comprises a nucleotide sequence encoding a miR binding site, a microRNA binding site series (miR BSs), or a reverse complement thereof.

[0566] In some embodiments, the nucleotide sequence encoding the miR binding site series or the miR binding site is located in the 3′-UTR region of the viral genome (e.g., 3′ relative to the nucleic acid sequence encoding a payload), e.g., before the polyA sequence, 5′-UTR region of the viral genome (e.g., 5′ relative to the nucleic acid sequence encoding a payload), or both.

[0567] In some embodiments, the encoded miR binding site series comprise at least 1-5 copies, e.g., at least 1-3, 2-4, 3-5, 1, 2, 3, 4, 5 or more copies of a miR binding site (miR BS). In some embodiments, all copies are identical, e.g., comprise the same miR binding site. In some embodiments, the miR binding sites within the encoded miR binding site series are continuous and not separated by a spacer. In some embodiments, the miR binding sites within an encoded miR binding site series are separated by a spacer, e.g., a non-coding sequence. In some embodiments, the spacer is about 1 to 6 nucleotides or about 5 to 10 nucleotides, e.g., about 7-8 nucleotides, nucleotides in length. In some embodiments, the spacer coding sequence or reverse complement thereof comprises one or more of (i) GGAT; (ii) CACGTG; (iii) GCATGC, or a repeat of one or more of (i)-(iii). In some embodiments, the spacer comprises the nucleotide sequence of GATAGTTA (SEQ ID NO: 1846), or a nucleotide sequence having at least one, two, or three modifications, but no more than four modifications of GATAGTTA (SEQ ID NO: 1846).

[0568] In some embodiments, the encoded miR binding site series comprise at least 1-5 copies, e.g., at least 1-3, 2-4, 3-5, 1, 2, 3, 4, 5 or more copies of a miR binding site (miR BS). In some embodiments, at least 1, 2, 3, 4, 5, or all of the copies are different, e.g., comprise a different miR binding site. In some embodiments, the miR binding sites within the encoded miR binding site series are continuous and not separated by a spacer. In some embodiments, the miR binding sites within an encoded miR binding site series are separated by a spacer, e.g., a non-coding sequence. In some embodiments, the spacer is about 1 to 6 nucleotides or about 5 to 10 nucleotides, e.g., about 7-8 nucleotides, in length. In some embodiments, the spacer coding sequence or reverse complement thereof comprises one or more of (i) GGAT; (ii) CACGTG; (iii) GCATGC, or a repeat of one or more of (i)-(iii). In some embodiments, the spacer comprises the nucleotide sequence of GATAGTTA (SEQ ID NO: 1846), or a nucleotide sequence having at least one, two, or three modifications, but no more than four modifications of GATAGTTA (SEQ ID NO: 1846).

[0569] In some embodiments, the encoded miR binding site is substantially identical (e.g., at least 70%, 75%, 80%, 85%, 90%, 95%, 99% or 100% identical), to the miR in the host cell. In some embodiments, the encoded miR binding site comprises at least 1, 2, 3, 4, or 5 mismatches or no more than 6, 7, 8, 9, or 10 mismatches to a miR in the host cell. In some embodiments, the mismatched nucleotides are contiguous. In some embodiments, the mismatched nucleotides are non-contiguous. In some embodiments, the mismatched nucleotides occur outside the seed region-binding sequence of the miR binding site, such as at one or both ends of the miR binding site. In some embodiments, the encoded miR binding site is 100% identical to the miR in the host cell.

[0570] In some embodiments, the nucleotide sequence encoding the miR binding site is substantially complimentary (e.g., at least 70%, 75%, 80%, 85%, 90%, 95%, 99% or 100% identical), to the miR in the host cell. In some embodiments, to complementary sequence of the nucleotide sequence encoding the miR binding site comprises at least 1, 2, 3, 4, or 5 mismatches or no more than 6, 7, 8, 9, or 10 mismatches to a miR in the host cell. In some embodiments, the mismatched nucleotides are contiguous. In some embodiments, the mismatched nucleotides are non-contiguous. In some embodiments, the mismatched nucleotides occur outside the seed region-binding sequence of the miR binding site, such as at one or both ends of the miR binding site. In some embodiments, the encoded miR binding site is 100% identical to the miR in the host cell.

[0571] In some embodiments, an encoded miR binding site or sequence region is at least about 10 to about 125 nucleotides in length, e.g., at least about 10 to 50 nucleotides, 10 to 100 nucleotides, 50 to 100 nucleotides, 50 to 125 nucleotides, or 100 to 125 nucleotides in length. In some embodiments, an encoded miR binding site or sequence region is at least about 7 to about 28 nucleotides in length, e.g., at least about 8-28 nucleotides, 7-28 nucleotides, 8-18 nucleotides, 12-28 nucleotides, 20-26 nucleotides, 22 nucleotides, 24 nucleotides, or 26 nucleotides in length, and optionally comprises at least one consecutive region (e.g., 7 or 8 nucleotides) complementary (e.g., fully or partially complementary) to the seed sequence of a miRNA (e.g., a miR122, a miR142, a miR183).

[0572] In some embodiments, the encoded miR binding site is complementary (e.g., fully or partially complementary) to a miR expressed in liver or hepatocytes, such as miR122. In some embodiments, the encoded miR binding site or encoded miR binding site series comprises a miR122 binding site sequence. In some embodiments, the encoded miR122 binding site comprises the nucleotide sequence of ACAAACACCATTGTCACACTCCA (SEQ ID NO: 1840), or a nucleotide sequence having at least 50%, 55%, 60%, 65%, 70%, 75%, 80%, 85%, 90%, at least 95%, at least 99%, or 100% sequence identity, or having at least one, two, three, four, five, six, or seven modifications but no more than ten modifications to SEQ ID NO: 1840, e.g., wherein the modification can result in a mismatch between the encoded miR binding site and the corresponding miRNA. In some embodiments, the viral genome comprises at least 2, 3, 4, or 5 copies of the encoded miR122 binding site, e.g., an encoded miR122 binding site series, optionally wherein the encoded miR122 binding site series comprises the nucleotide sequence of: ACAAACACCATTGTCACACTCCACACAAACACCATTGTCACACTCCACACAAACACCATTGTCA CACTCCA (SEQ ID NO: 1841), or a nucleotide sequence having at least 50%, 55%, 60%, 65%, 70%, 75%, 80%, 85%, 90%, at least 95%, at least 99%, or 100% sequence identity, or having at least one, two, three, four, five, six, or seven modifications but no more than ten modifications to SEQ ID NO: 1841, e.g., wherein the modification can result in a mismatch between the encoded miR binding site and the corresponding miRNA. In some embodiments, at least two of the encoded miR122 binding sites are connected directly, e.g., without a spacer. In other embodiments, at least two of the encoded miR122 binding sites are separated by a spacer, e.g., 1, 2, 3, 4, 5, 6, 7, 8, 9, or 10 nucleotides in length, which is located between two or more consecutive encoded miR122 binding site sequences. In embodiments, the spacer is about 1 to 6 nucleotides or about 5 to 10 nucleotides, e.g., about 7-8, in length. In some embodiments, the spacer coding sequence or reverse complement thereof comprises one or more of (i) GGAT; (ii) CACGTG; (iii) GCATGC, or a repeat of one or more of (i)-(iii). In some embodiments, an encoded miR binding site series comprises at least 3-5 copies (e.g., 4 copies) of a miR122 binding site, with or without a spacer, wherein the spacer is about 1 to 6 nucleotides or about 5 to 10 nucleotides, e.g., about 7-8 nucleotides or about 8 nucleotides, in length. In some embodiments, the spacer comprises the nucleotide sequence of GATAGTTA (SEQ ID NO: 1846), or a nucleotide sequence having at least one, two, or three modifications, but no more than four modifications of GATAGTTA (SEQ ID NO: 1846).

[0573] In some embodiments, the encoded miR binding site is complementary (e.g., fully or partially complementary) to a miR expressed in hematopoietic lineage, including immune cells (e.g., antigen presenting cells or APC, including dendritic cells (DCs), macrophages, and B-lymphocytes). In some embodiments, the encoded miR binding site complementary to a miR expressed in hematopoietic lineage comprises a nucleotide sequence disclosed, e.g., in US 2018/0066279, the contents of which are incorporated by reference herein in its entirety.

[0574] In some embodiments, the encoded miR binding site or encoded miR binding site series comprises a miR-142-3p binding site sequence. In some embodiments, the encoded miR-142-3p binding site comprises the nucleotide sequence of TCCATAAAGTAGGAAACACTACA (SEQ ID NO: 1842), a nucleotide sequence having at least 50%, 55%, 60%, 65%, 70%, 75%, 80%, 85%, 90%, at least 95%, at least 99%, or 100% sequence identity, or having at least one, two, three, four, five, six, or seven modifications but no more than ten modifications to SEQ ID NO: 1842, e.g., wherein the modification can result in a mismatch between the encoded miR binding site and the corresponding miRNA. In some embodiments, the viral genome comprises at least 2, 3, 4, or 5 copies of the encoded miR-142-3p binding site, e.g., an encoded miR-142-3p binding site series. In some embodiments, the at least 2, 3, 4, or 5 copies (e.g., 2 or 3 copies) of the encoded miR-142-3p binding site are continuous (e.g., not separated by a spacer) or separated by a spacer. In some embodiments, the spacer is about 1 to 6 nucleotides or about 5 to 10 nucleotides, e.g., about 7-8 nucleotides or about 8 nucleotides, in length. In some embodiments, the spacer sequence comprises one or more of (i) GGAT; (ii) CACGTG; (iii) GCATGC, or a repeat of one or more of (i)-(iii). In some embodiments, the spacer comprises the nucleotide sequence of GATAGTTA (SEQ ID NO: 1846), or a nucleotide sequence having at least one, two, or three modifications, but no more than four modifications of GATAGTTA (SEQ ID NO: 1846).

[0575] In some embodiments, the encoded miR binding site is complementary (e.g., fully complementary or partially complementary) to a miR expressed in a DRG (dorsal root ganglion) neuron, e.g., a miR183, a miR182, and/or miR96 binding site. In some embodiments, the encoded miR binding site is complementary to a miR expressed in expressed in a DRG neuron comprises a nucleotide sequence disclosed, e.g., in WO2020/132455, the contents of which are incorporated by reference herein in its entirety.

[0576] In some embodiments, the encoded miR binding site or encoded miR binding site series comprises a miR183 binding site sequence. In some embodiments, the encoded miR183 binding site comprises the nucleotide sequence of AGTGAATTCTACCAGTGCCATA (SEQ ID NO: 1843), or a nucleotide sequence having at least 50%, 55%, 60%, 65%, 70%, 75%, 80%, 85%, 90%, at least 95%, at least 99%, or 100% sequence identity, or having at least one, two, three, four, five, six, or seven modifications but no more than ten modifications to SEQ ID NO: 1843, e.g., wherein the modification can result in a mismatch between the encoded miR binding site and the corresponding miRNA. In some embodiments, the sequence complementary to the seed sequence corresponds to the double underlined of the encoded miR-183 binding site sequence. In some embodiments, the viral genome comprises at least comprises at least 2, 3, 4, or 5 copies (e.g., at least 2 or 3 copies) of the encoded miR183 binding site, e.g. an encoded miR183 binding site. In some embodiments, the at least 2, 3, 4, or 5 copies (e.g., 2 or 3 copies) of the encoded miR183 binding site are continuous (e.g., not separated by a spacer) or separated by a spacer. In some embodiments, the spacer is about 1 to 6 nucleotides or about 5 to 10 nucleotides, e.g., about 7-8 nucleotides or about 8 nucleotides, in length. In some embodiments, the spacer comprises the nucleotide sequence of GATAGTTA (SEQ ID NO: 1846), or a nucleotide sequence having at least one, two, or three modifications, but no more than four modifications of GATAGTTA (SEQ ID NO: 1846).

[0577] In some embodiments, the encoded miR binding site or encoded miR binding site series comprises a miR182 binding site sequence. In some embodiments, the encoded miR182 binding site comprises, the nucleotide sequence of AGTGTGAGTTCTACCATTGCCAAA (SEQ ID NO: 1844), a nucleotide sequence having at least 50%, 55%, 60%, 65%, 70%, 75%, 80%, 85%, 90%, at least 95%, at least 99%, or 100% sequence identity, or having at least one, two, three, four, five, six, or seven modifications but no more than ten modifications to SEQ ID NO: 1844, e.g., wherein the modification can result in a mismatch between the encoded miR binding site and the corresponding miRNA. In some embodiments, the viral genome comprises at least 2, 3, 4, or 5 copies of the encoded miR182 binding site, e.g., an encoded miR182 binding site series. In some embodiments, the at least 2, 3, 4, or 5 copies (e.g., 2 or 3 copies) of the encoded miR182 binding site are continuous (e.g., not separated by a spacer) or separated by a spacer. In some embodiments, the spacer is about 1 to 6 nucleotides or about 5 to 10 nucleotides, e.g., about 7-8 nucleotides or about 8 nucleotides, in length. In some embodiments, the spacer comprises the nucleotide sequence of GATAGTTA (SEQ ID NO: 1846), or a nucleotide sequence having at least one, two, or three modifications, but no more than four modifications of GATAGTTA (SEQ ID NO: 1846).

[0578] In some embodiments, the encoded miR binding site or encoded miR binding site series comprises a miR96 binding site sequence. In some embodiments, the encoded miR96 binding site comprises the nucleotide sequence of AGCAAAAATGTGCTAGTGCCAAA (SEQ ID NO: 1845), a sequence having at least 50%, 55%, 60%, 65%, 70%, 75%, 80%, 85%, 90%, at least 95%, at least 99%, or 100% sequence identity, or having at least one, two, three, four, five, six, or seven modifications but no more than ten modifications to SEQ ID NO: 1845, e.g., wherein the modification can result in a mismatch between the encoded miR binding site and the corresponding miRNA. In some embodiments, the viral genome comprises at least 2, 3, 4, or 5 copies of the encoded miR96 binding site, e.g., an encoded miR96 binding site series. In some embodiments, the at least 2, 3, 4, or 5 copies (e.g., 2 or 3 copies) of the encoded miR96 binding site are continuous (e.g., not separated by a spacer) or separated by a spacer. In some embodiments, the spacer is about 1 to 6 nucleotides or about 5 to 10 nucleotides, e.g., about 7-8 nucleotides or about 8 nucleotides, in length. In some embodiments, the spacer comprises the nucleotide sequence of GATAGTTA (SEQ ID NO: 1846), or a nucleotide sequence having at least one, two, or three modifications, but no more than four modifications of GATAGTTA (SEQ ID NO: 1846).

[0579] In some embodiments, the encoded miR binding site series comprises a miR122 binding site, a miR142 binding site, a miR183 binding site, a miR182 binding site, a miR 96 binding site, or a combination thereof. In some embodiments, the encoded miR binding site series comprises at least 2, 3, 4, or 5 copies of a miR122 binding site, a miR142 binding site, a miR183 binding site, a miR182 binding site, a miR 96 binding site, or a combination thereof. In some embodiments, at least two of the encoded miR binding sites are connected directly, e.g., without a spacer. In other embodiments, at least two of the encoded miR binding sites are separated by a spacer, e.g., 1, 2, 3, 4, 5, 6, 7, 8, 9, or 10 nucleotides in length, which is located between two or more consecutive encoded miR binding site sequences. In embodiments, the spacer is at least about 5 to 10 nucleotides, e.g., about 7-8 nucleotides or about 8 nucleotides, in length. In some embodiments, the spacer coding sequence or reverse complement thereof comprises one or more of (i) GGAT; (ii) CACGTG; (iii) GCATGC, or a repeat of one or more of (i)-(iii). In some embodiments, the spacer comprises the nucleotide sequence of GATAGTTA (SEQ ID NO: 1846), or a nucleotide sequence having at least one, two, or three modifications, but no more than four modifications of GATAGTTA (SEQ ID NO: 1846).

[0580] In some embodiments, an encoded miR binding site series comprises at least 2-5 copies (e.g., 2 or 3 copies) of a combination of at least two, three, four, five, or all of a miR122 binding site, a miR142 binding site, a miR183 binding site, a miR182 binding site, a miR96 binding site, wherein each of the miR binding sites within the series are continuous (e.g., not separated by a spacer) or are separated by a spacer. In some embodiments, the spacer is about 1 to 6 nucleotides or about 5 to 10 nucleotides, e.g., about 7-8 nucleotides or about 8 nucleotides, in length. In some embodiments, the spacer sequence comprises one or more of (i) GGAT; (ii) CACGTG; (iii) GCATGC, or a repeat of one or more of (i)-(iii). In some embodiments, the spacer comprises the nucleotide sequence of GATAGTTA (SEQ ID NO: 1846), or a nucleotide sequence having at least one, two, or three modifications, but no more than four modifications of GATAGTTA (SEQ ID NO: 1846).

### Viral Genome Component: Polyadenylation Sequence

[0581] In some embodiments, the viral genome of the AAV particles of the present disclosure comprises at least one polyadenylation sequence. The viral genome of the AAV particle may comprise a polyadenylation sequence between the 3′ end of the payload coding sequence and the 5′ end of the 3′UTR.

[0582] In some embodiments, the polyA signal region comprises a length of about 100-600 nucleotides, e.g., about 100-500 nucleotides, about 100-400 nucleotides, about 100-300 nucleotides, about 100-200 nucleotides, about 200-600 nucleotides, about 200-500 nucleotides, about 200-400 nucleotides, about 200-300 nucleotides, about 300-600 nucleotides, about 300-500 nucleotides, about 300-400 nucleotides, about 400-600 nucleotides, about 400-500 nucleotides, or about 500-600 nucleotides. In some embodiments, the polyA signal region comprises a length of about 100 to 150 nucleotides, e.g., about 127 nucleotides. In some embodiments, the polyA signal region comprises a length of about 450 to 500 nucleotides, e.g., about 477 nucleotides. In some embodiments, the polyA signal region comprises a length of about 520 to about 560 nucleotides, e.g., about 552 nucleotides. In some embodiments, the polyA signal region comprises a length of about 127 nucleotides.

[0583] In some embodiments, the encoded NPC protein may be located upstream of the polyadenylation sequence (e.g., 5′ relative to the polyadenylation sequence) in an expression vector or a viral genome described herein. Further, the encoded NPC protein may be located downstream of a promoter (e.g., 3′ relative to a promoter) such as, but not limited to, CMV, U6, CBA, or a CBA promoter with a SV40 intron in an expression vector, viral genome, or a fragment thereof (e.g., one disclosed herein). In some embodiments, the encoded NPC protein may be located within 1, 2, 3, 4, 5, 6, 7, 8, 9, 10, 11, 12, 13, 14, 15, 16, 17, 18, 19, 20, 21, 22, 23, 24, 25, 26, 27, 28, 29, 30, or more than 30 nucleotides downstream from the promoter (e.g., 3′ relative to the promoter) and/or upstream of the polyadenylation sequence (e.g., 5′ relative to the polyadenylation sequence) in an expression vector or a viral genome described herein. In some embodiments, the encoded NPC protein may be located within 1-5, 1-10, 1-15, 1-20, 1-25, 1-30, 5-10, 5-15, 5-20, 5-25, 5-30, 10-15, 10-20, 10-25, 10-30, 15-20, 15-25, 15-30, 20-25, 20-30, or 25-30 nucleotides downstream from the promoter (e.g., 3′ relative to the promoter) and/or upstream of the polyadenylation sequence (e.g., 5′ relative to the polyadenylation sequence) in an expression vector or a viral genome described herein. In some embodiments, the encoded NPC protein may be located within the first 1%, 2%, 3%, 4%, 5%, 6%, 7%, 8%, 9%, 10%, 15%, 20%, 25%, or more than 25% of the nucleotides downstream from the promoter (e.g., 3′ relative to the promoter) and/or upstream of the polyadenylation sequence (e.g., 5′ relative to the polyadenylation sequence) in an expression vector or a viral genome described herein. In some embodiments, the encoded NPC protein may be located within the first 1-5%, 1-10%, 1-15%, 1-20%, 1-25%, 5-10%, 5-15%, 5-20%, 5-25%, 10-15%, 10-20%, 10-25%, 15-20%, 15-25%, or 20-25% downstream from the promoter (e.g., 3′ relative to the promoter) and/or upstream of the polyadenylation sequence (e.g., 5′ relative to the polyadenylation sequence) in an expression vector or viral genome described herein.

[0584] In some embodiments, the viral genome comprises a rabbit globin polyA signal region. In some embodiments, the viral genome comprises a human growth hormone (hGH) polyA sequence. In some embodiments, the viral genome comprises an hGH polyA as described above and a payload region encoding NPC protein e.g., encoding a sequence as provided in Table 2 or fragment or variant thereof.

### Viral Genome Component: Filler Sequence

[0585] In some embodiments, the viral genome comprises one or more filler sequences. The filler sequence may be a wild-type sequence or an engineered sequence. A filler sequence may be a variant of a wild-type sequence. In some embodiments, a filler sequence is a derivative of human albumin.

[0586] In some embodiments, the viral genome comprises one or more filler sequences in order to have the length of the viral genome be the optimal size for packaging. In some embodiments, the viral genome comprises at least one filler sequence in order to have the length of the viral genome be about 2.3 kb. In some embodiments, the viral genome comprises at least one filler sequence in order to have the length of the viral genome be about 4.6 kb.

[0587] In some embodiments, the viral genome is a single stranded (ss) viral genome and comprises one or more filler sequences that, independently or together, have a length about between 0.1 kb-3.8 kb, such as, but not limited to, 0.1 kb, 0.2 kb, 0.3 kb, 0.4 kb, 0.5 kb, 0.6 kb, 0.7 kb, 0.8 kb, 0.9 kb, 1 kb, 1.1 kb, 1.2 kb, 1.3 kb, 1.4 kb, 1.5 kb, 1.6 kb, 1.7 kb, 1.8 kb, 1.9 kb, 2 kb, 2.1 kb, 2.2 kb, 2.3 kb, 2.4 kb, 2.5 kb, 2.6 kb, 2.7 kb, 2.8 kb, 2.9 kb, 3 kb, 3.1 kb, 3.2 kb, 3.3 kb, 3.4 kb, 3.5 kb, 3.6 kb, 3.7 kb, or 3.8 kb. In some embodiments, the total length filler sequence in the viral genome is 3.1 kb. In some embodiments, the total length filler sequence in the viral genome is 2.7 kb. In some embodiments, the total length filler sequence in the viral genome is 0.8 kb. In some embodiments, the total length filler sequence in the viral genome is 0.4 kb. In some embodiments, the length of each filler sequence in the viral genome is 0.8 kb. In some embodiments, the length of each filler sequence in the viral genome is 0.4 kb.

[0588] In some embodiments, the viral genome is a self-complementary (sc) viral genome and comprises one or more filler sequences that, independently or together, have a length about between 0.1 kb-1.5 kb, such as, but not limited to, 0.1 kb, 0.2 kb, 0.3 kb, 0.4 kb, 0.5 kb, 0.6 kb, 0.7 kb, 0.8 kb, 0.9 kb, 1 kb, 1.1 kb, 1.2 kb, 1.3 kb, 1.4 kb, or 1.5 kb. In some embodiments, the total length filler sequence in the viral genome is 0.8 kb. In some embodiments, the total length filler sequence in the viral genome is 0.4 kb. In some embodiments, the length of each filler sequence in the viral genome is 0.8 kb. In some embodiments, the length of each filler sequence in the viral genome is 0.4 kb.

[0589] In some embodiments, the viral genome comprises any portion of a filler sequence. The viral genome may comprise 1%, 2%, 3%, 4%, 5%, 6%, 7%, 8%, 9%, 10%, 15%, 20%, 25%, 30%, 35%, 40%, 45%, 50%, 55%, 60%, 65%, 70%, 75%, 80%, 85%, 90%, 95%, or 99% of a filler sequence.

[0590] In some embodiments, the viral genome is a single stranded (ss) viral genome and comprises one or more filler sequences in order to have the length of the viral genome be about 4.6 kb or 2.3kb. In some embodiments, the viral genome comprises at least one filler sequence and the filler sequence is located 3′ to the 5′ ITR sequence. In some embodiments, the viral genome comprises at least one filler sequence and the filler sequence is located 5′ to a promoter sequence. In some embodiments, the viral genome comprises at least one filler sequence and the filler sequence is located 3′ to the polyadenylation signal sequence. In some embodiments, the viral genome comprises at least one filler sequence and the filler sequence is located 5′ to the 3′ ITR sequence. In some embodiments, the viral genome comprises at least one filler sequence, and the filler sequence is located between two intron sequences. In some embodiments, the viral genome comprises at least one filler sequence, and the filler sequence is located within an intron sequence. In some embodiments, the viral genome comprises two filler sequences, and the first filler sequence is located 3′ to the 5′ ITR sequence and the second filler sequence is located 3′ to the polyadenylation signal sequence. In some embodiments, the viral genome comprises two filler sequences, and the first filler sequence is located 5′ to a promoter sequence and the second filler sequence is located 3′ to the polyadenylation signal sequence. In some embodiments, the viral genome comprises two filler sequences, and the first filler sequence is located 3′ to the 5′ ITR sequence and the second filler sequence is located 5′ to the 5′ ITR sequence.

[0591] In some embodiments, the viral genome may comprise one or more filler sequences between one of more regions of the viral genome. In some embodiments, the filler region may be located before a region such as, but not limited to, a payload region, an inverted terminal repeat (ITR), a promoter region, an intron region, an enhancer region, a polyadenylation signal sequence region, and/or an exon region. In some embodiments, the filler region may be located after a region such as, but not limited to, a payload region, an inverted terminal repeat (ITR), a promoter region, an intron region, an enhancer region, a polyadenylation signal sequence region, and/or an exon region. In some embodiments, the filler region may be located before and after a region such as, but not limited to, a payload region, an inverted terminal repeat (ITR), a promoter region, an intron region, an enhancer region, a polyadenylation signal sequence region, and/or an exon region.

### Viral Genome Component: Payloads

[0592] In some embodiments, an AAV particle, e.g., an AAV particle for the vectorized delivery of an NPC protein, e.g., an NPC1 protein described herein, comprises a payload. In some embodiments, an AAV particle, e.g., an AAV particle for the vectorized delivery of an NPC protein described herein (e.g., an NPC1 protein), comprises a promoter operably linked to a nucleic acid comprising a transgene encoding a payload. In some embodiments, the payload comprises an NPC protein, e.g., an NPC1 protein.

[0593] In some embodiments, the disclosure herein provides constructs that allow for improved expression of NPC protein delivered by gene therapy vectors.

[0594] In some embodiments, the disclosure provides constructs that allow for improved biodistribution of NPC protein delivered by gene therapy vectors.

[0595] In some embodiments, the disclosure provides constructs that allow for improved sub-cellular distribution or trafficking of NPC protein delivered by gene therapy vectors.

[0596] In some embodiments, the disclosure provides constructs that allow for improved trafficking of NPC protein to lysosomal membranes delivered by gene therapy vectors.

[0597] In some aspects, the present disclosure relates to compositions containing or comprising nucleic acid sequence(s) encoding NPC protein or functional fragment(s) or variants thereof and methods of administering these compositions in vitro or in vivo in humans and/or animal models of disease.

[0598] AAV particles of the present disclosure may comprise a nucleic acid sequence encoding at least one “payload.” As used herein, “payload” or “payload region” refers to one or more polynucleotides or polynucleotide regions encoded by or within a viral genome or an expression product of such polynucleotide or polynucleotide region, e.g., a transgene, a polynucleotide encoding a polypeptide or multi-polypeptide, e.g., NPC protein or fragment or variant thereof. The payload may comprise any nucleic acid known in the art that is useful for the expression (by supplementation of the protein product or gene replacement using a modulatory nucleic acid) of NPC protein in a target cell transduced or contacted with the AAV particle carrying the payload.

[0599] The payload construct may comprise a combination of coding and non-coding nucleic acid sequences.

[0600] Any segment, fragment, or the entirety of the viral genome and therein, the payload construct, may be codon optimized.

[0601] In some embodiments, the nucleic acid sequence, e.g., the viral genome, of the AAV particle may be a payload construct comprising at least one portion encoding NPC protein. Exemplary nucleic acid sequences useful for expressing an NPC protein payload as described herein are provided in Table 2, along with encoded NPC protein amino acid sequences. In some embodiments, the at least one portion of a payload construct encoding NPC protein is derived from a nucleic acid sequence useful for expressing an NPC protein payload provided in Table 2, or a sequence substantially identical, (e.g., having at least about 70%, 75%, 80%, 85%, 90%, 92%, 95%, 97%, 98%, or 99% sequence identity) to the aforesaid sequences.

[0602] In some embodiments, the payload construct encodes more than one payload. As a non-limiting example, a payload construct encoding more than one payload may be replicated and packaged into a viral particle. A target cell transduced with a viral particle comprising more than one payload may express each of the payloads in a single cell.

[0603] In some embodiments, the payload construct may encode a coding or non-coding RNA. In certain embodiments, the adeno-associated viral vector particle further comprises at least one cis-element selected from the group consisting of a Kozak sequence, a backbone sequence, and an intron sequence.

[0604] In some embodiments, the payload is a polypeptide which may be a peptide or protein. A protein encoded by the payload construct may comprise a secreted protein, an intracellular protein, an extracellular protein, and/or a membrane protein. The encoded proteins may be structural or functional. Proteins encoded by the payload construct include, but are not limited to, mammalian proteins. In certain embodiments, the AAV particle contains a viral genome that encodes NPC protein or fragment or variant thereof. The AAV particles encoding a payload may be useful in the fields of human disease, veterinary applications, and a variety of in vivo and in vitro settings.

[0605] In some embodiments, a payload may comprise polypeptides that serve as marker proteins to assess cell transformation and expression, fusion proteins, polypeptides having a desired biological activity, gene products that can complement a genetic defect, RNA molecules, transcription factors, and other gene products that are of interest in regulation and/or expression. In some embodiments, a payload may comprise nucleotide sequences that provide a desired effect or regulatory function (e.g., transposons, transcription factors).

[0606] The encoded payload may comprise a gene therapy product. A gene therapy product may include, but is not limited to, a polypeptide, RNA molecule, or other gene product that, when expressed in a target cell, provides a desired therapeutic effect. In some embodiments, a gene therapy product may comprise a substitute for a non-functional gene or a gene that is absent, expressed in insufficient amounts, or mutated. In some embodiments, a gene therapy product may comprise a substitute for a non-functional protein or polypeptide or a protein or polypeptide that is absent, expressed in insufficient amounts, misfolded, degraded too rapidly, or mutated. For example, a gene therapy product may comprise an NPC protein or a polynucleotide encoding an NPC protein to treat NPC protein deficiency or NPC1 or related disorders.

[0607] In some embodiments, the payload encodes a messenger RNA (mRNA). As used herein, the term “messenger RNA” (mRNA) refers to any polynucleotide that encodes a polypeptide of interest and that is capable of being translated to produce the encoded polypeptide of interest in vitro, in vivo, in situ, or ex vivo. Certain embodiments provide the mRNA as encoding NPC protein or a variant thereof.

[0608] The components of an mRNA include, but are not limited to, a coding region, a 5′-UTR (untranslated region), a 3′-UTR, a 5′-cap and a poly-A tail. In some embodiments, the encoded mRNA or any portion of the AAV genome may be codon optimized.

[0609] In some embodiments, the protein or polypeptide encoded by the payload construct encoding NPC protein or a variant thereof is between about 50 and about 4500 amino acid residues in length (hereinafter in this context, “X amino acids in length” refers to X amino acid residues). In some embodiments, the protein or polypeptide encoded is between 50-2000 amino acids in length. In some embodiments, the protein or polypeptide encoded is between 50-1000 amino acids in length. In some embodiments, the protein or polypeptide encoded is between 50-1500 amino acids in length. In some embodiments, the protein or polypeptide encoded is between 50-1000 amino acids in length. In some embodiments, the protein or polypeptide encoded is between 50-800 amino acids in length. In some embodiments, the protein or polypeptide encoded is between 50-600 amino acids in length. In some embodiments, the protein or polypeptide encoded is between 50-400 amino acids in length. In some embodiments, the protein or polypeptide encoded is between 50-200 amino acids in length. In some embodiments, the protein or polypeptide encoded is between 50-100 amino acids in length.

[0610] A payload construct encoding a payload may comprise or encode a selectable marker. A selectable marker may comprise a gene sequence or a protein or polypeptide encoded by a gene sequence expressed in a host cell that allows for the identification, selection, and/or purification of the host cell from a population of cells that may or may not express the selectable marker. In some embodiments, the selectable marker provides resistance to survive a selection process that would otherwise kill the host cell, such as treatment with an antibiotic. In some embodiments, an antibiotic selectable marker may comprise one or more antibiotic resistance factors, including but not limited to neomycin resistance (e.g., neo), hygromycin resistance, kanamycin resistance, and/or puromycin resistance.

[0611] In some embodiments, a payload construct encoding a payload may comprise a selectable marker including, but not limited to, β-lactamase, luciferase, 0-galactosidase, or any other reporter gene as that term is understood in the art, including cell-surface markers, such as CD4 or the truncated nerve growth factor (NGFR) (for GFP, see WO 96/23810; Heim et al., Current Biology 2:178-182 (1996); Heim et al., Proc. Natl. Acad. Sci. USA (1995); or Heim et al., Science 373:663-664 (1995); for β-lactamase, see WO 96/30540); the contents of each of which are herein incorporated by reference in their entirety.

[0612] In some embodiments, a payload construct encoding a selectable marker may comprise a fluorescent protein. A fluorescent protein as herein described may comprise any fluorescent marker including but not limited to green, yellow, and/or red fluorescent protein (GFP, YFP, and/or RFP). In some embodiments, a payload construct encoding a selectable marker may comprise a human influenza hemagglutinin (HA) tag.

[0613] In certain embodiments, a nucleic acid for expression of a payload in a target cell will be incorporated into the viral genome and located between two ITR sequences.

[0614] In some embodiments, a payload construct further comprises a nucleic acid sequence encoding a peptide that binds to the cation-independent mannose 6-phosphate (M6P) receptor (CI-MPR) with high affinity, as described in Int'l Pat. App. Pub. No. WO2019213180A1, the disclosure of which is incorporated herein by reference in its entirety. The peptide that binds CI-MPR can be, e.g., an IGF2 peptide or variant thereof. Binding of CI-MPR can facilitate cellular uptake or delivery and intracellular or sub-cellular targeting of therapeutic proteins provided by gene therapy vectors.

Exemplary NPC protein Payloads

[0615] In some embodiments, the payload, e.g., of a viral genome described herein, is an NPC protein, including NPC1 protein, wild-type NPC1, and functional variants thereof, NPC2 protein, wild-type NPC2, and functional variants thereof. In some embodiments, a functional variant is a variant that retains some or all of the activity of its wild-type counterpart, so as to achieve a desired therapeutic effect. For example, in some embodiments, a functional variant is effective to be used in gene therapy to treat a disorder or condition, for example, a disease related to expression of NPC (e.g., NPC1), an NPC1 deficiency or NPC1 disease or related disorders. Unless indicated otherwise, a variant of an NPC protein as described herein (e.g., in the context of the constructs, vectors, genomes, methods, kits, compositions, etc. of the disclosure) is a functional variant.

[0616] As used herein, “associated with decreased NPC1/NPC2 protein levels” or “associated with decreased expression” means that one or more symptoms of a disease are caused by lower-than-normal NPC1/NPC2 protein levels in a target tissue or in a biofluid such as blood. A disease or condition associated with decreased NPC1 protein levels or expression may be a disorder of the central nervous system. Also specifically contemplated herein are NPC disease and related disorders arising from expression of defective NPC1/NPC2 protein. Such a disease or condition may be a neuromuscular or a neurological disorder or condition. For example, a disease associated with decreased NPC1 protein levels may be NPC1 disease or related disorder, or may be another neurological or neuromuscular disorder described herein.

[0617] The present disclosure addresses the need for new technologies by providing NPC protein related treatment deliverable by AAV-based compositions and complexes for the treatment of NPC1 disease and related disorders.

[0618] While delivery is exemplified in the AAV context, other viral vectors, non-viral vectors, nanoparticles, or liposomes may be similarly used to deliver the therapeutic NPC protein(s) and include, but are not limited to, viral genomes of any of the AAV serotypes or other viral delivery vehicles or lentivirus, etc. The observations and teachings extend to any macromolecular structure, including modified cells, introduced into the CNS in the manner as described herein.

[0619] Given in Table 2 are the sequence identifiers of exemplary polynucleotide and polypeptide sequences for NPC proteins that may be used in the viral genomes disclosed herein and which may constitute an NPC protein payload. Functional variants, e.g., those retaining at least about 90% or at least 95% sequence identity to a sequence shown in Table 2, may also be used. Codon-optimized and other variants that encode the same or essentially the same NPC protein amino acid sequence (e.g., those having at least about 90% amino acid sequence identity) may also be used.

[0620] In some embodiments, the viral genome comprises a nucleic acid comprising a transgene encoding an NPC protein, e.g., an NPC1 protein, an NPC2 protein, or functional variant thereof. In some embodiments, the encoded NPC protein (e.g., NPC1 protein, NPC2 protein, or functional variant thereof) comprises an amino acid sequence from an NPC protein described herein, e.g., as described in Table 2, or an amino acid sequence substantially identical (e.g., having at least about 70%, 75%, 80%, 85%, 90%, 92%, 95%, 97%, 98%, or 99% sequence identity) to any of the aforesaid sequences. In some embodiments, the encoded NPC protein (e.g., NPC1 protein, NPC2 protein, or functional variant thereof) comprises an amino acid sequence from an NPC protein described herein, e.g., as described in Table 2, or an amino acid sequence having at least one, two or three modifications but not more than 30, 20 or 10 modifications relative to any of the aforesaid amino acid sequences. In some embodiments, the encoded NPC protein (e.g., NPC1 NPC2 protein, or functional variant thereof) comprises an amino acid sequence encoded by a nucleotide sequence encoding an NPC protein described herein, e.g., as described in Table 2, or a nucleotide sequence substantially identical (e.g., having at least about 70%, 75%, 80%, 85%, 90%, 92%, 95%, 97%, 98%, or 99% sequence identity) to any of the aforesaid sequences.

[0621] In some embodiments, the nucleotide sequence encoding the NPC protein (e.g., NPC1 protein, NPC2 protein, or functional variant thereof) comprises a nucleotide sequence encoding an NPC protein described herein, e.g., as described in Table 2, or a nucleotide sequence substantially identical (e.g., having at least about 70%, 75%, 80%, 85%, 90%, 92%, 95%, 97%, 98%, or 99% sequence identity) to any of the aforesaid sequences. In some embodiments, the nucleotide sequence encoding the NPC protein (e.g., NPC1 protein, NPC2 protein, or functional variant thereof) comprises a nucleotide sequence encoding an NPC protein described herein, e.g., as described in Table 2, or a nucleotide sequence having at least one, two or three modifications but not more than 30, 20 or 10 modifications relative to any of the aforesaid nucleotide sequences. In some embodiments, the nucleotide sequence encoding an NPC protein (e.g., NPC1 protein, NPC2 protein, or functional variant thereof) is a codon optimized nucleotide sequence.

TABLE 2
Exemplary Nucleotide Sequences Encoding NPC
proteins and NPC Protein Amino Acid Sequences

| SEQ ID NO: | Type | Species | Description |
|---|---|---|---|
| 1724 | Protein | Homo sapiens | NPC1 protein NP_000262.2 |
| 1725 | DNA | Homo sapiens | NPC1 mRNA NM_000271.5 |
| 1726 | Protein | Homo sapiens | NPC2 protein NP_006423.1 |
| 1727 | DNA | Homo sapiens | NPC2 mRNA NM_006432.5 |
| 1728 | Protein | Homo sapiens | NPC2 protein NP_001350617.1 |
| 1729 | DNA | Homo sapiens | NPC2 mRNA NM_001363688.1 |
| 1730 | Protein | Homo sapiens | NPC2 protein NP_001362369.1 |
| 1731 | DNA | Homo sapiens | NPC2 mRNA NM_001375440.1 |
| 1732 | DNA | Macaca mulatta | NPC2 mRNA NM_001266760.1 |
| 1747 | DNA | Homo sapiens | Wild type Human NPC1 |
| | | | Coding Sequence |
| 1748 | Protein | Homo sapiens | Wild type Human NPC1 |
| | | | Protein Sequence |
| 1749 | DNA | Artificial sequence | Codon optimized Human |
| | | | NPC1 Coding Sequence 1 |
| 1750 | DNA | Artificial sequence | Codon optimized Human |
| | | | NPC1 Coding Sequence 2 |

[0622] In some embodiments, the encoded NPC protein (e.g., NPC1 protein, NPC2 protein, or functional variant thereof) comprises the amino acid sequence of any one of SEQ ID NOs: 1724, 1726, 1728, 1730, or 1748, or an amino acid sequence substantially identical (e.g., having at least about 70%, 75%, 80%, 85%, 90%, 92%, 95%, 97%, 98%, or 99% sequence identity) to any of the aforesaid sequences. In some embodiments, the encoded NPC protein (e.g., NPC1 protein, NPC2 protein, or functional variant thereof) comprises the amino acid sequence of any one of SEQ ID NOs: 1724, 1726, 1728, 1730, or 1748, or an amino acid sequence having at least one, two or three modifications but not more than 30, 20 or 10 modifications relative to any of the aforesaid amino acid sequences. In some embodiments, the encoded NPC protein (e.g., NPC1 protein, NPC2 protein, or functional variant thereof) comprises an amino acid sequence encoded by the nucleotide sequence of any one of SEQ ID NOs: 1725, 1727, 1729, 1731, 1732, 1747, 1749, or 1750, or a nucleotide sequence substantially identical (e.g., having at least about 70%, 75%, 80%, 85%, 90%, 92%, 95%, 97%, 98%, or 99% sequence identity) to any of the aforesaid sequences.

[0623] In some embodiments, the nucleotide sequence encoding the NPC protein (e.g., NPC1 protein, NPC2 protein, or functional variant thereof) comprises the nucleotide sequence of any one of SEQ ID NOs: 1725, 1727, 1729, 1731, 1732, 1747, 1749, or 1750, or a nucleotide sequence substantially identical (e.g., having at least about 70%, 75%, 80%, 85%, 90%, 92%, 95%, 97%, 98%, or 99% sequence identity) to any of the aforesaid sequences. In some embodiments, the nucleic acid sequence encoding the NPC protein (e.g., NPC1 protein, NPC2 protein, or functional variant thereof) comprises the nucleotide sequence of any one of SEQ ID NOs: 1725, 1727, 1729, 1731, 1732, 1747, 1749, or 1750, or a nucleotide sequence having at least one, two or three modifications but not more than 30, 20 or 10 modifications relative to any of the aforesaid nucleotide sequences. In some embodiments, the nucleotide sequence encoding the NPC protein (e.g., NPC1 protein, NPC2 protein, or functional variant thereof) does not comprise a stop codon. In some embodiments, the nucleotide sequence encoding the NPC protein (e.g., NPC1 protein, NPC2 protein, or functional variant thereof) is a codon optimized nucleotide sequence.

[0624] In some embodiments, the viral genome comprises a payload region encoding an NPC protein. The encoded NPC protein may be derived from any species, such as, but not limited to human, non-human primate, or rodent.

[0625] In some embodiments, the viral genome comprises a payload region encoding a human (Homo sapiens) NPC protein, or a variant thereof.

[0626] Various embodiments of the disclosure herein provide an adeno-associated viral (AAV) particle comprising a viral genome, the viral genome comprising at least one inverted terminal repeat region and a nucleic acid sequence encoding a polypeptide having at least 90% sequence identity to a human NPC protein sequence as provided in Table 2.

[0627] In some embodiments, the AAV viral genome comprises at least one inverted terminal repeat region and a nucleic acid sequence encoding a polypeptide having at least 90% sequence identity to an NPC protein sequence as provided in Table 2. In some embodiments, the AAV viral genome comprises at least one inverted terminal repeat region and a nucleic acid sequence encoding a polypeptide having at least 95% sequence identity to an NPC protein sequence as provided in Table 2. In some embodiments, the AAV viral genome comprises at least one inverted terminal repeat region and a nucleic acid sequence encoding a polypeptide having at least 98% sequence identity to an NPC protein sequence as provided in Table 2. In some embodiments, the AAV viral genome comprises at least one inverted terminal repeat region and a nucleic acid sequence encoding a polypeptide having at least 99% sequence identity to an NPC protein sequence as provided in Table 2. In some embodiments, the AAV viral genome comprises at least one inverted terminal repeat region and a nucleic acid sequence encoding an NPC protein sequence provided in Table 2.

[0628] In some embodiments, the NPC protein is derived from an NPC1/NPC2 sequence of a non-human primate, such as the cynomolgus monkey, Macaca fascicularis. Certain embodiments provide the NPC protein as a humanized version of a Macaca fascicularis sequence.

[0629] In some embodiments, the viral genome comprises a payload region encoding a cynomolgus or crab-eating (long-tailed) macaque (Macaca fascicularis) NPC protein, or a variant thereof.

[0630] In some embodiments, the viral genome comprises a payload region encoding a rhesus macaque (Macaca mulatta) NPC protein, or a variant thereof.

[0631] In some embodiments, the NPC protein may comprise an amino acid sequence with 50%, 51%, 52%, 53%, 54%, 55%, 56%, 57%, 58%, 59%, 60%, 61%, 62%, 63%, 64%, 65%, 66%, 67%, 68%, 69%, 70%, 71%, 72%, 73%, 74%, 75%, 76%, 77%, 78%, 79%, 80%, 81%, 82%, 83%, 84%, 85%, 86%, 87%, 88%, 89%, 90%, 91%, 92%, 93%, 94%, 95%, 96%, 97%, 98%, 99%, or 100% identity to any of the those described above and provided in Table 2.

[0632] In some embodiments, the NPC protein may be encoded by a nucleic acid sequence with 50%, 51%, 52%, 53%, 54%, 55%, 56%, 57%, 58%, 59%, 60%, 61%, 62%, 63%, 64%, 65%, 66%, 67%, 68%, 69%, 70%, 71%, 72%, 73%, 74%, 75%, 76%, 77%, 78%, 79%, 80%, 81%, 82%, 83%, 84%, 85%, 86%, 87%, 88%, 89%, 90%, 91%, 92%, 93%, 94%, 95%, 96%, 97%, 98%, 99%, or 100% identity to any of the those described above and provided in Table 2.

### Exemplary NPC1 Proteins and NPC1 Protein Coding Sequences

[0633] In some embodiments, a viral genome described herein encoding an NPC1 protein, for example as a payload, comprises a nucleotide sequence encoding a wild type human NPC1 amino acid sequence.

[0634] In some embodiments, the viral genome comprises a nucleic acid encoding a transgene encoding an NPC1 protein, e.g., an NPC1 protein described herein. In some embodiments, the encoded NPC1 protein comprises the amino acid sequence of SEQ ID NO: 1748, an amino acid sequence substantially identical (e.g., having at least about 70%, 75%, 80%, 85%, 90%, 92%, 95%, 97%, 98%, or 99% sequence identity) to SEQ ID NO: 1748, or an amino acid sequence having at least one, two or three modifications, but not more than 30, 20 or 10 modifications of the amino acid sequence of SEQ ID NO: 1748. In some embodiments, the NPC1 protein comprises an amino acid sequence encoded by the nucleotide sequence of any of SEQ ID NOs: 1747, 1749, or 1750, or a nucleotide sequence substantially identical (e.g., having at least about 70%, 75%, 80%, 85%, 90%, 92%, 95%, 97%, 98%, or 99% sequence identity) to any of the aforesaid sequences.

[0635] In some embodiments, the encoded NPC1 protein comprises the amino acid sequence of SEQ ID NO: 1724, an amino acid substantially identical (e.g., having at least about 70%, 75%, 80%, 85%, 90%, 92%, 95%, 97%, 98%, or 99% sequence identity) to SEQ ID NO: 1724, or an amino acid sequence having at least one, two or three modifications, but not more than 30, 20 or 10 modifications of the amino acid sequence of SEQ ID NO: 1724. In some embodiments, the NPC1 protein comprises an amino acid sequence encoded by the nucleotide sequence of SEQ ID NO: 1725, or a nucleotide sequence substantially identical (e.g., having at least about 70%, 75%, 80%, 85%, 90%, 92%, 95%, 97%, 98%, or 99% sequence identity) thereto. In some embodiments, the encoded NPC1 protein comprises a modification, e.g., a substitution. In some embodiments, the encoded NPC1 protein comprises an amino acid substitution at position M642, e.g., an M642I substitution, numbered according to SEQ ID NO: 1724.

[0636] In some embodiments, the nucleotide sequence encoding an NPC1 protein comprises the nucleotide sequence of SEQ ID NO: 1747, or a nucleotide sequence substantially identical (e.g., having at least about 70%, 75%, 80%, 85%, 90%, 92%, 95%, 97%, 98%, or 99% sequence identity) to SEQ ID NO: 1747. In some embodiments, the nucleotide sequence encoding an NPC1 protein comprises the nucleotide sequence of SEQ ID NO: 1747, or a nucleotide sequence having at least one, two or three modifications but not more than 30, 20 or 10 modifications of the amino acid sequence of SEQ ID NO: 1747. In some embodiments, the nucleotide sequence encoding the NPC1 protein does not comprise a stop codon, e.g., nucleotides 3835-3837 numbered relative to SEQ ID NO: 1747.

[0637] In some embodiments, the nucleotide sequence encoding an NPC1 protein comprises the nucleotide sequence of SEQ ID NO: 1749, or a nucleotide sequence substantially identical (e.g., having at least about 70%, 75%, 80%, 85%, 90%, 92%, 95%, 97%, 98%, or 99% sequence identity) to SEQ ID NO: 1749. In some embodiments, the nucleotide sequence encoding an NPC1 protein comprises the nucleotide sequence of SEQ ID NO: 1749, or a nucleotide sequence having at least one, two or three modifications but not more than 30, 20 or 10 modifications of the amino acid sequence of SEQ ID NO: 1749. In some embodiments, the nucleotide sequence encoding the NPC1 protein is a codon optimized nucleotide sequence. In some embodiments, the nucleotide sequence encoding the NPC1 protein does not comprise a stop codon, e.g., nucleotides 3835-3837 numbered relative to SEQ ID NO: 1749.

[0638] In some embodiments, the nucleotide sequence encoding an NPC1 protein comprises the nucleotide sequence of SEQ ID NO: 1750, or a nucleotide sequence substantially identical (e.g., having at least about 70%, 75%, 80%, 85%, 90%, 92%, 95%, 97%, 98%, or 99% sequence identity) to SEQ ID NO: 1750. In some embodiments, the nucleotide sequence encoding an NPC1 protein comprises the nucleotide sequence of SEQ ID NO: 1750, or a nucleotide sequence having at least one, two or three modifications but not more than 30, 20 or 10 modifications of the amino acid sequence of SEQ ID NO: 1750. In some embodiments, the nucleotide sequence encoding the NPC1 protein is a codon optimized nucleotide sequence. In some embodiments, the nucleotide sequence encoding the NPC1 protein does not comprise a stop codon, e.g., nucleotides 3835-3837 numbered relative to SEQ ID NO: 1750.

[0639] One example of a nucleic acid sequence encoding a wild type human NPC1 amino acid sequence is provided as SEQ ID NO: 1747. Thus, in some embodiments, the viral genomes may comprise a nucleic acid sequence of SEQ ID NO: 1747. Some embodiments provide for viral genomes comprising a nucleic acid sequence having 75% or more, 80% or more, 85% or more, 90% or more, or 95% or more sequence identity compared to SEQ ID NO: 1747. Some embodiments provide for viral genomes comprising a nucleic acid sequence having 95%, 96%, 97%, 98%, 99%, or 100% sequence identity compared to SEQ ID NO: 1747.

[0640] Some embodiments of the viral genomes described herein encoding an NPC1 protein, for example as a payload, comprise a codon optimized nucleotide sequence encoding an NPC1 amino acid sequence. One example of a codon optimized nucleic acid sequence encoding an NPC1 amino acid sequence is provided as SEQ ID NO: 1749. Thus, in some embodiments, the viral genomes may comprise a nucleic acid sequence of SEQ ID NO: 1749. Some embodiments provide for viral genomes comprising a nucleic acid sequence having 75% or more, 80% or more, 85% or more, 90% or more, or 95% or more sequence identity compared to SEQ ID NO: 1749. Some embodiments provide for viral genomes comprising a nucleic acid sequence having 95%, 96%, 97%, 98%, 99%, or 100% sequence identity compared to SEQ ID NO: 1749. Another example of a codon optimized nucleic acid sequence encoding an NPC1 amino acid sequence is provided as SEQ ID NO: 1750. Thus, in some embodiments, the viral genomes may comprise a nucleic acid sequence of SEQ ID NO: 1750. Some embodiments provide for viral genomes comprising a nucleic acid sequence having 75% or more, 80% or more, 85% or more, 90% or more, or 95% or more sequence identity compared to SEQ ID NO: 1750. Some embodiments provide for viral genomes comprising a nucleic acid sequence having 95%, 96%, 97%, 98%, 99%, or 100% sequence identity compared to SEQ ID NO: 1750.

[0641] NPC1 protein-encoding viral genomes provided herein may encode an NPC1 protein having an amino acid sequence as provided in SEQ ID NO: 1724. Some embodiments provide for viral genomes comprising an NPC1 protein-encoding sequence encoding an NPC1 protein having 75% or more, 80% or more, 85% or more, 90% or more, or 95% or more sequence identity compared to SEQ ID NO: 1724. Some embodiments provide for viral genomes comprising an NPC1 protein-encoding sequence encoding an NPC1 protein having 95%, 96%, 97%, 98%, 99%, or 100% sequence identity compared to SEQ ID NO: 1724. In some embodiments, one or more amino acid substitutions are introduced in the NPC1 protein. For example, the NPC1 protein may comprise an M642I substitution. Accordingly, some embodiments, of the NPC1 protein-encoding viral genomes may encode an NPC1 protein having an amino acid sequence as provided in SEQ ID NO: 1748. Some embodiments provide for viral genomes comprising an NPC1 protein-encoding sequence encoding an NPC1 protein having 75% or more, 80% or more, 85% or more, 90% or more, or 95% or more sequence identity compared to SEQ ID NO: 1748. Some embodiments provide for viral genomes comprising an NPC1 protein-encoding sequence encoding an NPC1 protein having 95%, 96%, 97%, 98%, 99%, or 100% sequence identity compared to SEQ ID NO: 1748.

[0642] Additional examples of AAV vectors for use in the compositions and methods described herein include the AAV9-EF1α-NPC1 vector, e.g., as described in Chandler, Randy J., et al. “Systemic AAV9 gene therapy improves the lifespan of mice with Niemann-Pick disease, type C1.” Human molecular genetics 26.1 (2017): 52-64; Venditti, Charles P., Randy Chandler, and William J. Pavan. “Viral gene therapy as treatment for cholesterol storage disease or disorder.” U.S. patent application Ser. No. 15/565,065 (Pub. No. US2018/0104289); and Hammond, Natalie, Andrew B. Munkacsi, and Stephen L. Sturley. “The complexity of a monogenic neurodegenerative disease: More than two decades of therapeutic driven research into Niemann-Pick type C disease.” Biochimica et Biophysica Acta (BBA)—Molecular and Cell Biology of Lipids (2019); the disclosures of each of which are incorporated herein by reference in their entireties. In some embodiments, the AAV vector for use in the methods described herein is as described in Int'l Pat. App. Pub. No. WO2018/237066A1 or European Pat. No. 3280451B1, the disclosures of each of which are incorporated by reference in their entireties.

### Self-Complementary and Single Strand Vectors

[0643] In some embodiments, the AAV vector used in the present disclosure is a single strand vector (ssAAV).

[0644] In some embodiments, the AAV vectors may be self-complementary AAV vectors (scAAVs). See, e.g., U.S. Pat. No. 7,465,583. scAAV vectors contain both DNA strands that anneal together to form double stranded DNA. By skipping second strand synthesis, scAAVs allow for rapid expression in the cell.

[0645] In some embodiments, the AAV vector used in the present disclosure is a scAAV.

[0646] Methods for producing and/or modifying AAV vectors are disclosed in the art such as pseudotyped AAV vectors (International Patent Publication Nos. WO200028004; WO200123001; WO2004112727; WO 2005005610 and WO 2005072364, the content of each of which are incorporated herein by reference in their entirety).

### Viral Genome Size

[0647] In some embodiments, the viral genome of the AAV particles of the present disclosure may be single or double stranded. The size of the viral genome may be small, medium, large or the maximum size.

[0648] In some embodiments, the viral genome, which comprises a nucleic acid sequence encoding NPC protein described herein, may be a small single stranded viral genome. A small single stranded viral genome may be about 2.7 kb to about 3.5 kb in size such as about 2.7, about 2.8, about 2.9, about 3.0, about 3.1, about 3.2, about 3.3, about 3.4, or about 3.5 kb in size. In some embodiments, the small single stranded viral genome may be 3.2 kb in size.

[0649] In some embodiments, the viral genome, which comprises a nucleic acid sequence encoding NPC protein described herein, may be a small double stranded viral genome. A small double stranded viral genome may be about 1.3 to about 1.7 kb in size such as about 1.3, about 1.4, about 1.5, about 1.6, or about 1.7 kb in size. In some embodiments, the small double stranded viral genome may be 1.6 kb in size.

[0650] In some embodiments, the viral genome, which comprises a nucleic acid sequence encoding NPC protein described herein, may be a medium single stranded viral genome. A medium single stranded viral genome may be about 3.6 to about 4.3 kb in size such as about 3.6, about 3.7, about 3.8, about 3.9, about 4.0, about 4.1, about 4.2, or about 4.3 kb in size. In some embodiments, the medium single stranded viral genome may be 4.0 kb in size.

[0651] In some embodiments, the viral genome, which comprises a nucleic acid sequence encoding NPC protein described herein, may be a medium double stranded viral genome. A medium double stranded viral genome may be about 1.8 to about 2.1 kb in size such as about 1.8, about 1.9, about 2.0, or about 2.1 kb in size. In some embodiments, the medium double stranded viral genome may be 2.0 kb in size. Additionally, the viral genome may comprise a promoter and a polyA tail.

[0652] In some embodiments, the viral genome which comprises a nucleic acid sequence encoding NPC protein described herein may be a large single stranded viral genome. A large single stranded viral genome may be 4.4 to 6.0 kb in size such as about 4.4, 4.5, 4.6, 4.7, 4.8, 4.9, 5.0, 5.1, 5.2, 5.3, 5.4, 5.5, 5.6, 5.7, 5.8, 5.9 and 6.0 kb in size. As a non-limiting example, the large single stranded viral genome may be 4.7 kb in size. As another non-limiting example, the large single stranded viral genome may be 4.8 kb in size. As yet another non-limiting example, the large single stranded viral genome may be 6.0 kb in size.

[0653] In some embodiments, the viral genome which comprises a nucleic acid sequence encoding NPC protein described herein may be a large double stranded viral genome. A large double stranded viral genome may be 2.2 to 3.0 kb in size such as about 2.2, 2.3, 2.4, 2.5, 2.6, 2.7, 2.8, 2.9 and 3.0 kb in size. As a non-limiting example, the large double stranded viral genome may be 2.4 kb in size.

### Exemplary NPC1 AAV Viral Genome Sequence Regions and ITR to ITR Sequences

[0654] In some embodiments, a viral genome, e.g., an AAV viral genome or vector genome, described herein, comprises a promoter operably linked to a transgene encoding an NPC1 protein. In some embodiments, the viral genome further comprises an inverted terminal repeat region, an enhancer, an intron, a Kozak sequence, a polyA region, or a combination thereof.

[0655] In some embodiments, the viral genome comprises a nucleotide sequence comprising, from 5′ to 3′, a 5′ inverted terminal repeat region, a promoter region, a Kozak sequence region, an NPC protein region comprising a nucleic acid sequence encoding an NPC protein, a polyA region, and a 3′ inverted terminal repeat; that is, an ITR to ITR sequence. Exemplary sequence regions within ITR to ITR sequences for viral genomes according to the description are provided in Table 3.

TABLE 3
Exemplary NPC1 AAV Vector Sequence
Regions in ITR to ITR sequences

| | Description of | Length of | |
|---|---|---|---|
| | Sequence | Sequence | SEQ ID |
| Sequence Regions | Region | Region | NO: |
| 5′ ITR | — | 130 | 1733 |
| 3′ ITR | — | 130 | 1734 |
| 5′ ITR | — | 141 | 1837 |
| 3′ ITR | — | 141 | 1838 |
| Promoter Region | CBA Promoter | 260 | 1735 |
| Promoter Region | CMV Promoter | 205 | 1736 |
| Promoter Region | CMVie Enhancer | 380 | 1737 |
| Promoter Region | CBA-D4 Promoter | 339 | 1738 |
| Promoter Region | CMV-D3 Promoter | 361 | 1739 |
| Promoter Region | CMV-D4 Promoter | 289 | 1740 |
| Promoter Region | CMV-D6 Promoter | 163 | 1741 |
| Promoter Region | CMVie Enhancer | 66 | 1742 |
| Promoter Region | CMVie Enhancer | 156 | 1743 |
| Promoter Region | CMV-D7 | 109 | 1744 |
| Promoter Region | miniEF1a Promoter | 227 | 1745 |
| Intron Region | pClneo-intron | 133 | 1780 |
| Kozak Region | Kozak Sequence | 9 | 1746 |
| NPC Protein coding | Wild type human NPC | 3837 | 1747 |
| sequence | protein coding sequence | | |
| NPC Protein coding | Codon optimized NPC | 3837 | 1749 |
| sequence 1 | protein coding sequence 1 | | |
| NPC Protein coding | Codon optimized NPC | 3837 | 1750 |
| sequence 2 | protein coding sequence 2 | | |
| Polyadenylation | — | 127 | 1751 |
| region | | | |

[0656] In some embodiments, the viral genome comprises an inverted terminal repeat sequence region (ITR) provided in Table 3, or a nucleotide sequence with at least 70%, 75%, 80%, 85%, 90%, 95% or 99% sequence identity to any of the ITR sequences in Table 3. In some embodiments, the ITR comprises the nucleotide sequence of any one of SEQ ID NOs: 1733-1734 or 1837-1838, or a sequence with at least 70%, 75%, 80%, 85%, 90%, 95% or 99% sequence identity thereto. In some embodiments, the ITR comprises the nucleotide sequence of SEQ ID NO: 1733 or a nucleotide sequence with at least 70%, 75%, 80%, 85%, 90%, 95% or 99% sequence identity thereto. In some embodiments, the ITR comprises the nucleotide sequence of SEQ ID NO: 1734 or a nucleotide sequence with at least 70%, 75%, 80%, 85%, 90%, 95% or 99% sequence identity thereto. In some embodiments, the ITR comprises the nucleotide sequence of SEQ ID NO: 1837 or a nucleotide sequence with at least 70%, 75%, 80%, 85%, 90%, 95% or 99% sequence identity thereto. In some embodiments, the ITR comprises the nucleotide sequence of SEQ ID NO: 1838 or a nucleotide sequence with at least 70%, 75%, 80%, 85%, 90%, 95% or 99% sequence identity thereto. In some embodiments, the viral genome comprises an ITR, e.g., a 5′ ITR, comprising the nucleotide sequence of SEQ ID NO: 1733 or a sequence with at least with at least 70%, 75%, 80%, 85%, 90%, 95% or 99% sequence identity thereto; and an ITR, e.g., a 3′ ITR, comprising the nucleotide sequence of SEQ ID NO: 1734 or a nucleotide sequence at least 70%, 75%, 80%, 85%, 90%, 95% or 99% sequence identity thereto. In some embodiments, the viral genome comprises an ITR, e.g., a 5′ ITR, comprising the nucleotide sequence of SEQ ID NO: 1837 or a sequence with at least with at least 70%, 75%, 80%, 85%, 90%, 95% or 99% sequence identity thereto; and an ITR, e.g., a 3′ ITR, comprising the nucleotide sequence of SEQ ID NO: 1838 or a nucleotide sequence at least 70%, 75%, 80%, 85%, 90%, 95% or 99% sequence identity thereto.

[0657] In some embodiments, the viral genome comprises a promoter provided in Table 3 or Table 12 or a nucleotide sequence with at least 70%, 75%, 80%, 85%, 90%, 95% or 99% sequence identity to any of the promoter sequences in Table 3 or Table 12.

[0658] In some embodiments, the promoter of a viral genome described herein comprises a CMV promoter or a functional variant thereof. In some embodiments the promoter comprises the nucleotide sequence of any one of SEQ ID NOs: 1736 or 1739-1741, or a nucleotide sequence least 70%, 75%, 80%, 85%, 90%, 95% or 99% identical thereto. In some embodiments, the viral genome comprises a CMVie enhancer. In some embodiments, the CMVie enhancer comprises the nucleotide sequence of any one of SEQ ID NOs: 1737, 1742, or 1743, or a nucleotide sequence least 70%, 75%, 80%, 85%, 90%, 95% or 99% identical thereto. In some embodiments, the viral genome comprises a CMVie enhancer and a CMV promoter. In some embodiments, the CMVie enhancer comprises the nucleotide sequence of SEQ ID NO: 1743, or a nucleotide sequence at least 70%, 75%, 80%, 85%, 90%, 95% or 99% identical thereto, and the CMV promoter comprises the nucleotide sequence of SEQ ID NO: 1736, or a nucleotide sequence at least 70%, 75%, 80%, 85%, 90%, 95% or 99% identical thereto.

[0659] In some embodiments, the promoter of a viral genome described herein comprises a CBA promoter or a functional variant thereof. In some embodiments, the promoter comprises the nucleotide sequence of SEQ ID NO: 1735 or 1738, or a nucleotide sequence at least 70%, 75%, 80%, 85%, 90%, 95% or 99% identical thereto. In some embodiments, the viral genome described herein comprises a CMVie enhancer and a CBA promoter. In some embodiments, the CMVie enhancer comprises the nucleotide sequence of SEQ ID NO: 1742, or a nucleotide sequence 70%, 75%, 80%, 85%, 90%, 95% or 99% identical thereto, and the CBA promoter comprises the nucleotide sequence of SEQ ID NO: 1735, or a nucleotide sequence at least 70%, 75%, 80%, 85%, 90%, 95% or 99% identical thereto. In some embodiments, the CMVie enhancer comprises the nucleotide sequence of SEQ ID NO: 1737, or a nucleotide sequence 70%, 75%, 80%, 85%, 90%, 95% or 99% identical thereto, and the CBA promoter comprises the nucleotide sequence of SEQ ID NO: 1735, or a nucleotide sequence at least 70%, 75%, 80%, 85%, 90%, 95% or 99% identical thereto.

[0660] In some embodiments, the viral genome described herein comprises an EF-1a promoter or an EF-1a promoter variant. In some embodiments, the EF-1a promoter or the EF-1a promoter variant comprises a nucleotide sequence of a promoter or promoter variant, e.g., as described in Table 12, or a nucleotide sequence at least 70%, 75%, 80%, 85%, 90%, 95% or 99% identical thereto.

[0661] In some embodiments, the EF-1a promoter comprises the nucleotide sequence of SEQ ID NO: 1781, or a nucleotide sequence at least 70%, 75%, 80%, 85%, 90%, 95% or 99% identical thereto. In some embodiments, the EF-1a promoter comprises an intron, e.g., an intron comprising the nucleotide sequence of positions 237-1,184 of SEQ ID NO: 1781. In some embodiments, the EF-1a promoter does not comprise an intron, e.g., an intron comprising the nucleotide sequence of positions 237-1,184 of SEQ ID NO: 1781. In some embodiments, the EF-1a promoter comprises a portion of an intron, e.g., a portion comprising no more than 5-50 nucleotides, 5-40 nucleotides, 5-30 nucleotides, 5-20 nucleotides, 5-10 nucleotides, 10-50 nucleotides, 10-40 nucleotides, 10-30 nucleotides, 10-20 nucleotides, 20-50 nucleotides, 20-40 nucleotides, 20-30 nucleotides, 30-50 nucleotides, 30-40 nucleotides, 40-50 nucleotides, 5 nucleotides, 10 nucleotides, 15 nucleotides, 20 nucleotides, 25 nucleotides, 30 nucleotides, 40 nucleotides, or 50 nucleotides of the intron e.g., an intron comprising the nucleotide sequence of positions 237-1,184 of SEQ ID NO: 1781. In some embodiments, EF-1a promoter comprises a portion of an intron, wherein the portion comprises the nucleotide sequence of SEQ ID NO: 1798.

[0662] In some embodiments, the viral genome comprises an EF-1a promoter variant. In some embodiments, the EF-1a promoter variant comprises [A]-[B]-[C]-[D]-[E], wherein [A] comprises SEQ ID NO: 1792, 1793, or 1794, or a sequence having at least sequence comprising at least one, two, or three but no more than four modifications, e.g., substitutions, relative to the nucleotide sequence of SEQ ID NO: 1792, 1793, or 1794; or [A] is absent; [B] comprises the nucleotide sequence of SEQ ID NO: 1795, or a sequence having at least sequence comprising at least one or two, but no more than 3 modifications, e.g., substitutions, relative to the nucleotide sequence of SEQ ID NO: 1795 or [B] is absent; [C] comprises the nucleotides GT, the nucleotide sequence of SEQ ID NO: 1797, or a nucleotide sequence comprising at least one, two, or three but no more than four modifications, e.g., substitutions, relative to the nucleotide sequence of SEQ ID NO: 1797, or [C] is absent; [D] comprises the nucleotide sequence of SEQ ID NO: 1822 or 1823, or a nucleotide sequence having at least 90% (e.g., 92, 95, 96, 97, 98, or 99%) sequence identity thereto; and [E] comprises the nucleotide sequence of SEQ ID NO: 1798, or a sequence having at least sequence comprising at least one or two, but no more than 3 modifications, e.g., substitutions, relative to the nucleotide sequence of SEQ ID NO: 1798 or [E] is absent.

[0663] In some embodiments, the EF-1a promoter variant comprises [A]-[B]-[C]-[D]-[E], wherein [A] comprises SEQ ID NO: 1792, 1793, or 1794, or a sequence having at least sequence comprising at least one, two, or three but no more than four modifications, e.g., substitutions, relative to the nucleotide sequence of SEQ ID NO: 1792, 1793, or 1794; or [A] is absent; [B] comprises the nucleotide sequence of SEQ ID NO: 1795, or a sequence having at least sequence comprising at least one or two, but no more than 3 modifications, e.g., substitutions, relative to the nucleotide sequence of SEQ ID NO: 1795 or [B] is absent; [C] comprises the nucleotides GT, the nucleotide sequence of SEQ ID NO: 1797, or a nucleotide sequence comprising at least one, two, or three but no more than four modifications, e.g., substitutions, relative to the nucleotide sequence of SEQ ID NO: 1797, or [C] is absent; [D] comprises the nucleotide sequence of SEQ ID NO: 1822, or a nucleotide sequence having at least 90% (e.g., 92, 95, 96, 97, 98, or 99%) sequence identity thereto, provided that [D] does not comprise the nucleotides “GC” at positions 235-236, numbered according to SEQ ID NO: 1781; and [E] comprises the nucleotide sequence of SEQ ID NO: 1798, or a sequence having at least sequence comprising at least one or two, but no more than 3 modifications, e.g., substitutions, relative to the nucleotide sequence of SEQ ID NO: 1798 or [E] is absent.

[0664] In some embodiments, the EF-1a promoter variant comprises [A]-[B]-[C]-[D]-[E], wherein [A] is absent, [B] is absent, [C] is absent, [D] comprises the nucleotide sequence of SEQ ID NO: 1823, or a nucleotide sequence having at least 90% (e.g., 92, 95, 96, 97, 98, or 99%) sequence identity thereto, and [E] comprises the nucleotide sequence of SEQ ID NO: 1798, or a sequence having at least sequence comprising at least one or two, but no more than 3 modifications, e.g., substitutions, relative to the nucleotide sequence of SEQ ID NO: 1798.

[0665] In some embodiments, the EF-1a promoter variant comprises [A]-[B]-[C]-[D]-[E], wherein [A] is absent, [B] is absent, [C] comprises the nucleotides GT, [D] comprises the nucleotide sequence of SEQ ID NO: 1823, or a nucleotide sequence having at least 90% (e.g., 92, 95, 96, 97, 98, or 99%) sequence identity thereto, and [E] comprises the nucleotide sequence of SEQ ID NO: 1798, or a sequence having at least sequence comprising at least one or two, but no more than 3 modifications, e.g., substitutions, relative to the nucleotide sequence of SEQ ID NO: 1798.

[0666] In some embodiments, the EF-1a promoter variant comprises [A]-[B]-[C]-[D]-[E], wherein [A] is absent, [B] is absent, [C] comprises the nucleotide sequence of SEQ ID NO: 1797, or a nucleotide sequence comprising at least one, two, or three but no more than four modifications, e.g., substitutions, relative to the nucleotide sequence of SEQ ID NO: 1797, [D] comprises the nucleotide sequence of SEQ ID NO: 1823, or a nucleotide sequence having at least 90% (e.g., 92, 95, 96, 97, 98, or 99%) sequence identity thereto, and [E] comprises the nucleotide sequence of SEQ ID NO: 1798, or a sequence having at least sequence comprising at least one or two, but no more than 3 modifications, e.g., substitutions, relative to the nucleotide sequence of SEQ ID NO: 1798.

[0667] In some embodiments, the EF-1a promoter variant comprises [A]-[B]-[C]-[D]-[E], wherein [A] is absent, [B] comprises the nucleotide sequence of SEQ ID NO: 1795, or a sequence having at least sequence comprising at least one or two, but no more than 3 modifications, e.g., substitutions, relative to the nucleotide sequence of SEQ ID NO: 1795, [C] comprises the nucleotide sequence of SEQ ID NO: 1797, or a nucleotide sequence comprising at least one, two, or three but no more than four modifications, e.g., substitutions, relative to the nucleotide sequence of SEQ ID NO: 1797, [D] comprises the nucleotide sequence of SEQ ID NO: 1823, or a nucleotide sequence having at least 90% (e.g., 92, 95, 96, 97, 98, or 99%) sequence identity thereto, and [E] comprises the nucleotide sequence of SEQ ID NO: 1798, or a sequence having at least sequence comprising at least one or two, but no more than 3 modifications, e.g., substitutions, relative to the nucleotide sequence of SEQ ID NO: 1798.

[0668] In some embodiments, the EF-1a promoter variant comprises [A]-[B]-[C]-[D]-[E], wherein [A] is absent, [B] comprises the nucleotide sequence of SEQ ID NO: 1795, or a sequence having at least sequence comprising at least one or two, but no more than 3 modifications, e.g., substitutions, relative to the nucleotide sequence of SEQ ID NO: 1795, [C] comprises the nucleotide sequence of SEQ ID NO: 1797, or a nucleotide sequence comprising at least one, two, or three but no more than four modifications, e.g., substitutions, relative to the nucleotide sequence of SEQ ID NO: 1797, [D] comprises the nucleotide sequence of SEQ ID NO: 1822, or a nucleotide sequence having at least 90% (e.g., 92, 95, 96, 97, 98, or 99%) sequence identity thereto, and [E] is absent.

[0669] In some embodiments, the EF-1a promoter variant comprises [A]-[B]-[C]-[D]-[E], wherein [A] comprises SEQ ID NO: 1792, or a sequence having at least sequence comprising at least one or two modifications, e.g., substitutions, relative to the nucleotide sequence of SEQ ID NO: 1792, [B] comprises the nucleotide sequence of SEQ ID NO: 1795, or a sequence having at least sequence comprising at least one or two, but no more than 3 modifications, e.g., substitutions, relative to the nucleotide sequence of SEQ ID NO: 1795, [C] comprises the nucleotide sequence of SEQ ID NO: 1797, or a nucleotide sequence comprising at least one, two, or three but no more than four modifications, e.g., substitutions, relative to the nucleotide sequence of SEQ ID NO: 1797, [D] comprises the nucleotide sequence of SEQ ID NO: 1823, or a nucleotide sequence having at least 90% (e.g., 92, 95, 96, 97, 98, or 99%) sequence identity thereto, and [E] comprises the nucleotide sequence of SEQ ID NO: 1798, or a sequence having at least sequence comprising at least one or two, but no more than 3 modifications, e.g., substitutions, relative to the nucleotide sequence of SEQ ID NO: 1798.

[0670] In some embodiments, the EF-1a promoter variant comprises [A]-[B]-[C]-[D]-[E], wherein [A] comprises SEQ ID NO: 1792, or a sequence having at least sequence comprising at least one or two modifications, e.g., substitutions, relative to the nucleotide sequence of SEQ ID NO: 1792, [B] comprises the nucleotide sequence of SEQ ID NO: 1795, or a sequence having at least sequence comprising at least one or two, but no more than 3 modifications, e.g., substitutions, relative to the nucleotide sequence of SEQ ID NO: 1795, [C] comprises the nucleotide sequence of SEQ ID NO: 1797, or a nucleotide sequence comprising at least one, two, or three but no more than four modifications, e.g., substitutions, relative to the nucleotide sequence of SEQ ID NO: 1797, [D] comprises the nucleotide sequence of SEQ ID NO: 1822, or a nucleotide sequence having at least 90% (e.g., 92, 95, 96, 97, 98, or 99%) sequence identity thereto, and [E] is absent.

[0671] In some embodiments, the EF-1a promoter variant comprises [A]-[B]-[C]-[D]-[E], wherein [A] comprises SEQ ID NO: 1793, or a sequence having at least sequence comprising at least one, two, or three but no more than four modifications, e.g., substitutions, relative to the nucleotide sequence of SEQ ID NO: 1793, [B] comprises the nucleotide sequence of SEQ ID NO: 1795, or a sequence having at least sequence comprising at least one or two, but no more than 3 modifications, e.g., substitutions, relative to the nucleotide sequence of SEQ ID NO: 1795, [C] comprises the nucleotide sequence of SEQ ID NO: 1797, or a nucleotide sequence comprising at least one, two, or three but no more than four modifications, e.g., substitutions, relative to the nucleotide sequence of SEQ ID NO: 1797, [D] comprises the nucleotide sequence of SEQ ID NO: 1823, or a nucleotide sequence having at least 90% (e.g., 92, 95, 96, 97, 98, or 99%) sequence identity thereto, and [E] comprises the nucleotide sequence of SEQ ID NO: 1798, or a sequence having at least sequence comprising at least one or two, but no more than 3 modifications, e.g., substitutions, relative to the nucleotide sequence of SEQ ID NO: 1798.

[0672] In some embodiments, the EF-1a promoter variant comprises [A]-[B]-[C]-[D]-[E], wherein [A] comprises SEQ ID NO: 1793, or a sequence having at least sequence comprising at least one, two, or three but no more than four modifications, e.g., substitutions, relative to the nucleotide sequence of SEQ ID NO: 1793, [B] comprises the nucleotide sequence of SEQ ID NO: 1795, or a sequence having at least sequence comprising at least one or two, but no more than 3 modifications, e.g., substitutions, relative to the nucleotide sequence of SEQ ID NO: 1795, [C] comprises the nucleotide sequence of SEQ ID NO: 1797, or a nucleotide sequence comprising at least one, two, or three but no more than four modifications, e.g., substitutions, relative to the nucleotide sequence of SEQ ID NO: 1797, [D] comprises the nucleotide sequence of SEQ ID NO: 1822, or a nucleotide sequence having at least 90% (e.g., 92, 95, 96, 97, 98, or 99%) sequence identity thereto, and [E] is absent.

[0673] In some embodiments, the EF-1a promoter variant comprises [A]-[B]-[C]-[D]-[E], wherein [A] comprises SEQ ID NO: 1794, or a sequence having at least sequence comprising at least one, two, or three but no more than four modifications, e.g., substitutions, relative to the nucleotide sequence of SEQ ID NO: 1794, [B] comprises the nucleotide sequence of SEQ ID NO: 1795, or a sequence having at least sequence comprising at least one or two, but no more than 3 modifications, e.g., substitutions, relative to the nucleotide sequence of SEQ ID NO: 1795, [C] comprises the nucleotide sequence of SEQ ID NO: 1797, or a nucleotide sequence comprising at least one, two, or three but no more than four modifications, e.g., substitutions, relative to the nucleotide sequence of SEQ ID NO: 1797, [D] comprises the nucleotide sequence of SEQ ID NO: 1823, or a nucleotide sequence having at least 90% (e.g., 92, 95, 96, 97, 98, or 99%) sequence identity thereto, and [E] comprises the nucleotide sequence of SEQ ID NO: 1798, or a sequence having at least sequence comprising at least one or two, but no more than 3 modifications, e.g., substitutions, relative to the nucleotide sequence of SEQ ID NO: 1798.

[0674] In some embodiments, the EF-1a promoter variant comprises [A]-[B]-[C]-[D]-[E], wherein [A] comprises SEQ ID NO: 1794, or a sequence having at least sequence comprising at least one, two, or three but no more than four modifications, e.g., substitutions, relative to the nucleotide sequence of SEQ ID NO: 1794, [B] comprises the nucleotide sequence of SEQ ID NO: 1795, or a sequence having at least sequence comprising at least one or two, but no more than 3 modifications, e.g., substitutions, relative to the nucleotide sequence of SEQ ID NO: 1795, [C] comprises the nucleotide sequence of SEQ ID NO: 1797, or a nucleotide sequence comprising at least one, two, or three but no more than four modifications, e.g., substitutions, relative to the nucleotide sequence of SEQ ID NO: 1797, [D] comprises the nucleotide sequence of SEQ ID NO: 1822, or a nucleotide sequence having at least 90% (e.g., 92, 95, 96, 97, 98, or 99%) sequence identity thereto, [E] is absent.

[0675] In some embodiments, the viral genome comprises an EF-1a promoter variant, wherein the EF-1a promoter variant is a truncated EF-1a promoter variant. In some embodiments, the EF-1a promoter variant comprises the nucleotide sequence of the WT EF-1a promoter comprising SEQ ID NO: 1781 and a deletion. In some embodiments, the deletion comprises at least 10, 20, 25, 30, 50, 100, 150, 200, 250, 300, 350, 400, 450, 500, 550, 600, 650, 700, 750, 800, 850, 900, or 950 nucleotides. In some embodiments, the deletion is from the 3′ end of the EF-1a promoter (e.g., the WT EF-1a promoter, e.g., comprising SEQ ID NO: 1781), the 5′ end of the EF-1a promoter (e.g., the WT EF-1a promoter, e.g., comprising SEQ ID NO: 1781), both. In some embodiments, the EF-1a promoter variant, e.g., an EF-1a truncated promoter, comprises the nucleotide sequence of SEQ ID NO: 1781 or a sequence with at least 95% identity thereto, with a fragment of the WT EF-1a promoter deleted, optionally wherein the fragment comprises nucleotides 237-1,184 of SEQ ID NO: 1781 or nucleotides 242-1,184 of SEQ ID NO: 1781. In some embodiments, the EF-1a promoter variant further comprises the nucleotide sequence of SEQ ID NO: 1792, 1793, or 1794, or a sequence having at least one, two, or three but no more than four modifications, e.g., substitutions, relative to the nucleotide sequence of SEQ ID NO: 1792, 1793, or 1794.

[0676] In some embodiments, the EF-1a promoter variant, e.g., truncated EF-1a promoter, comprises a nucleotide sequence that is less than the full length of the nucleotide sequence of a wild-type (WT) EF-1a promoter comprising SEQ ID NO: 1781, optionally provided that the EF-1a promoter variant does not comprise the nucleotides “GC” at positions 235-236, numbered according to SEQ ID NO: 1781. In some embodiments, the EF-1a promoter variant, e.g., truncated EF-1a promoter, comprises a nucleotide sequence that comprises at least 10, 20, 25, 30, 50, 100, 150, 200, 250, 300, 350, 400, 450, 500, 550, 600, 650, 700, 750, 800, 850, 900, or 950 nucleotides less than the full length of a wild-type (WT) EF-1a promoter comprising SEQ ID NO: 1781. In some embodiments, the EF-1a promoter variant, e.g., truncated EF-1a promoter, comprises nucleotides 1-241 of SEQ ID NO: 1781. In some embodiments, the EF-1a promoter, e.g., truncated EF-1a promoter, variant comprises nucleotides 7-236 of SEQ ID NO: 1781. In some embodiments, the EF-1a promoter variant, e.g., truncated EF-1a promoter, comprises nucleotides 7-241 of SEQ ID NO: 1781. In some embodiments, the EF-1a promoter variant, e.g., truncated EF-1a promoter, comprises nucleotides 13-236 or 13-241 of SEQ ID NO: 1781. In some embodiments, the EF-1a promoter variant, e.g., truncated EF-1a promoter, comprises nucleotides 15-236 or 15-241 of SEQ ID NO: 1781. In some embodiments, the EF-1a promoter variant, e.g., truncated EF-1a promoter, further comprises the nucleotide sequence of SEQ ID NO: 1792, 1793, or 1794, or a sequence having at least one, two, or three but no more than four modifications, e.g., substitutions, relative to the nucleotide sequence of SEQ ID NO: 1792, 1793, or 1794.

[0677] In some embodiments, the EF-1a promoter variant, e.g., truncated EF-1a promoter, comprises from 5′ to 3,′ the nucleotide sequence of SEQ ID NO: 1792, or a sequence having at least one or two modifications, e.g., substitutions, relative to the nucleotide sequence of SEQ ID NO: 1792; and nucleotides 1-236 of SEQ ID NO: 1781. In some embodiments, the EF-1a promoter variant, e.g., truncated EF-1a promoter, comprises from 5′ to 3,′ the nucleotide sequence of SEQ ID NO: 1793, or a sequence having at least one, two, or three but no more than four modifications, e.g., substitutions, relative to the nucleotide sequence of SEQ ID NO: 1793; and nucleotides 1-236 of SEQ ID NO: 1781. In some embodiments, the EF-1a promoter variant, e.g., truncated EF-1a promoter, comprises from 5′ to 3,′ the nucleotide sequence of SEQ ID NO: 1794, or a sequence having at least one, two, or three but no more than four modifications, e.g., substitutions, relative to the nucleotide sequence of SEQ ID NO: 1794; and nucleotides 1-236 of SEQ ID NO: 1781.

[0678] In some embodiments, the EF-1a promoter variant, e.g., truncated EF-1a promoter, comprises an intron, e.g., an intron comprising the nucleotide sequence of positions 237-1,184 of SEQ ID NO: 1781. In some embodiments, the EF-1a promoter variant, e.g., truncated EF-1a promoter, comprises a portion of an intron, wherein the portion comprises no more than 5-50 nucleotides, e.g., 5-40 nucleotides, 5-30 nucleotides, 5-20 nucleotides, 5-10 nucleotides, 10-50 nucleotides, 10-40 nucleotides, 10-30 nucleotides, 10-20 nucleotides, 20-50 nucleotides, 20-40 nucleotides, 20-30 nucleotides, 30-50 nucleotides, 30-40 nucleotides, 40-50 nucleotides, 5 nucleotides, 10 nucleotides, 15 nucleotides, 20 nucleotides, 25 nucleotides, 30 nucleotides, 40 nucleotides, or 50 nucleotides of the intron e.g., an intron comprising the nucleotide sequence of positions 237-1,184 of SEQ ID NO: 1781. In some embodiments, the EF-1a promoter variant, e.g., truncated EF-1a promoter, comprises a portion of an intron, wherein the portion comprises the nucleotide sequence of SEQ ID NO: 1798. In some embodiments, the EF-1a promoter variant, e.g., truncated EF-1a promoter, does not comprises an intron, e.g., does not comprise the nucleotide sequence of positions 237-1,184 of SEQ ID NO: 1781.

[0679] In some embodiments, the promoter of a viral genome described herein comprises the nucleotide sequence of any of SEQ ID NOs: 1785, 1782-1784, 1786-1791, or a nucleotide sequence having at least 90% (e.g., 92, 95, 96, 97, 98, or 99%) sequence identity to any of the aforesaid sequence. In some embodiments, the promoter of a viral genome described herein comprises the nucleotide sequence of SEQ ID NO: 1785, or a sequence having at least 90% (e.g., 92, 95, 96, 97, 98, or 99%) sequence identity thereto. In some embodiments, the promoter of a viral genome described herein comprises the nucleotide sequence of SEQ ID NO: 1787, or a sequence having at least 90% (e.g., 92, 95, 96, 97, 98, or 99%) sequence identity thereto. In some embodiments, the promoter of a viral genome described herein comprises the nucleotide sequence of SEQ ID NO: 1789, or a sequence having at least 90% (e.g., 92, 95, 96, 97, 98, or 99%) sequence identity thereto. In some embodiments, the promoter of a viral genome described herein comprises the nucleotide sequence of SEQ ID NO: 1791, or a sequence having at least 90% (e.g., 92, 95, 96, 97, 98, or 99%) sequence identity thereto.

TABLE 12
Exemplary Promoter Variants

| | | | SEQ |
|---|---|---|---|
| | | | ID |
| Description | Sequences | Length | NO: |
| EF1a | CGTGAGGCTCCGGTGCCCGTCAGTGGGCAGAGCGCACATCGCCCACAGTCCCC | 1,184 | 1781 |
| Promoter | GAGAAGTTGGGGGGAGGGGTCGGCAATTGAACCGGTGCCTAGAGAAGGTGGCG | | |
| (intron | CGGGGTAAACTGGGAAAGTGATGTCGTGTACTGGCTCCGCCTTTTTCCCGAGG | | |
| underlined) | GTGGGGGAGAACCGTATATAAGTGCAGTAGTCGCCGTGAACGTTCTTTTTCGC | | |
| | AACGGGTTTGCCGCCAGAACACAGGTAAGTGCCGTGTGTGGTTCCCGCGGGCC | | |
| | TGGCCTCTTTACGGGTTATGGCCCTTGCGTGCCTTGAATTACTTCCACCTGGC | | |
| | TGCAGTACGTGATTCTTGATCCCGAGCTTCGGGTTGGAAGTGGGTGGGAGAGT | | |
| | TCGAGGCCTTGCGCTTAAGGAGCCCCTTCGCCTCGTGCTTGAGTTGAGGCCTG | | |
| | GCCTGGGCGCTGGGGCCGCCGCGTGCGAATCTGGTGGCACCTTCGCGCCTGTC | | |
| | TCGCTGCTTTCGATAAGTCTCTAGCCATTTAAAATTTTTGATGACCTGCTGCG | | |
| | ACGCTTTTTTTCTGGCAAGATAGTCTTGTAAATGCGGGCCAAGATCTGCACAC | | |
| | TGGTATTTCGGTTTTTGGGGCCGCGGGCGGCGACGGGGCCCGTGCGTCCCAGC | | |
| | GCACATGTTCGGCGAGGCGGGGCCTGCGAGCGCGGCCACCGAGAATCGGACGG | | |
| | GGGTAGTCTCAAGCTGGCCGGCCTGCTCTGGTGCCTGGCCTCGCGCCGCCGTG | | |
| | TATCGCCCCGCCCTGGGCGGCAAGGCTGGCCCGGTCGGCACCAGTTGCGTGAG | | |
| | CGGAAAGATGGCCGCTTCCCGGCCCTGCTGCAGGGAGCTCAAAATGGAGGACG | | |
| | CGGCGCTCGGGAGAGCGGGCGGGTGAGTCACCCACACAAAGGAAAAGGGCCTT | | |
| | TCCGTCCTCAGCCGTCGCTTCATGTGACTCCACGGAGTACCGGGCGCCGTCCA | | |
| | GGCACCTCGATTAGTTCTCGAGCTTTTGGAGTACGTCGTCTTTAGGTTGGGGG | | |
| | GAGGGGTTTTATGCGATGGAGTTTCCCCACACTGAGTGGGTGGAGACTGAAGT | | |
| | TAGGCCAGCTTGGCACTTGATGTAATTCTCCTTGGAATTTGCCCTTTTTGAGT | | |
| | TTGGATCTTGGTTCATTCTCAAGCCTCAGACAGTGGTTCAAAGTTTTTTTCTT | | |
| | CCATTTCAGGTGTCGTGA | | |
| miniEF1a | GCCCGTCAGTGGGCAGAGCGCACATCGCCCACAGTCCCCGAGAAGTTGGGGGG | 227 nt | 1745 |
| | AGGGGTCGGCAATTGAACCGGTGCCTAGAGAAGGTGGCGCGGGGTAAACTGGG | | |
| | AAAGTGATGTCGTGTACTGGCTCCGCCTTTTTCCCGAGGGTGGGGGAGAACCG | | |
| | TATATAAGTGCAGTAGTCGCCGTGAACGTTCTTTTTCGCAACGGGTTTGCCGC | | |
| | CAGAACACGCGTAAG | | |
| Promoter | GCATG | 5 nt | 1792 |
| Variant 1 | | | |
| Promoter | GGTGGAGAAGAGCATG | 16 nt | 1793 |
| Variant 2 | | | |
| Promoter | GTCATCACTGAGGTGGAGAAGAGCATG | 27 nt | 1794 |
| Variant 3 | | | |
| Promoter | CGTGAG | 6 nt | 1795 |
| Variant 4 | | | |
| Promoter | GT | 2 nt | 1796 |
| Variant 5 | | | |
| Promoter | GCTCCGGT | 8 nt | 1797 |
| Variant 6 | | | |
| Promoter | GCCCGTCAGTGGGCAGAGCGCACATCGCCCACAGTCCCCGAGAAGTTGGGGGG | 222 nt | 1822 |
| Variant 19 | AGGGGTCGGCAATTGAACCGGTGCCTAGAGAAGGTGGCGCGGGGTAAACTGGG | | |
| | AAAGTGATGTCGTGTACTGGCTCCGCCTTTTTCCCGAGGGTGGGGGAGAACCG | | |
| | TATATAAGTGCAGTAGTCGCCGTGAACGTTCTTTTTCGCAACGGGTTTGCCGC | | |
| | CAGAACACAG | | |
| Promoter | GCCCGTCAGTGGGCAGAGCGCACATCGCCCACAGTCCCCGAGAAGTTGGGGGG | 222 nt | 1823 |
| Variant 20 | AGGGGTCGGCAATTGAACCGGTGCCTAGAGAAGGTGGCGCGGGGTAAACTGGG | | |
| | AAAGTGATGTCGTGTACTGGCTCCGCCTTTTTCCCGAGGGTGGGGGAGAACCG | | |
| | TATATAAGTGCAGTAGTCGCCGTGAACGTTCTTTTTCGCAACGGGTTTGCCGC | | |
| | CAGAACACGC | | |
| Promoter | GTAAG | 5 nt | 1798 |
| Variant 7 | | | |
| Promoter | GTGCCCGTCAGTGGGCAGAGCGCACATCGCCCACAGTCCCCGAGAAGTTGGGG | 229 nt | 1782 |
| Variant 8 | GGAGGGGTCGGCAATTGAACCGGTGCCTAGAGAAGGTGGCGCGGGGTAAACTG | | |
| | GGAAAGTGATGTCGTGTACTGGCTCCGCCTTTTTCCCGAGGGTGGGGGAGAAC | | |
| | CGTATATAAGTGCAGTAGTCGCCGTGAACGTTCTTTTTCGCAACGGGTTTGCC | | |
| | GCCAGAACACGCGTAAG | | |
| Promoter | GCTCCGGTGCCCGTCAGTGGGCAGAGCGCACATCGCCCACAGTCCCCGAGAAG | 235 nt | 1783 |
| Variant 9 | TTGGGGGGAGGGGTCGGCAATTGAACCGGTGCCTAGAGAAGGTGGCGCGGGGT | | |
| | AAACTGGGAAAGTGATGTCGTGTACTGGCTCCGCCTTTTTCCCGAGGGTGGGG | | |
| | GAGAACCGTATATAAGTGCAGTAGTCGCCGTGAACGTTCTTTTTCGCAACGGG | | |
| | TTTGCCGCCAGAACACGCGTAAG | | |
| Promoter | CGTGAGGCTCCGGTGCCCGTCAGTGGGCAGAGCGCACATCGCCCACAGTCCCC | 241 nt | 1784 |
| Variant 10 | GAGAAGTTGGGGGGAGGGGTCGGCAATTGAACCGGTGCCTAGAGAAGGTGGCG | | |
| | CGGGGTAAACTGGGAAAGTGATGTCGTGTACTGGCTCCGCCTTTTTCCCGAGG | | |
| | GTGGGGGAGAACCGTATATAAGTGCAGTAGTCGCCGTGAACGTTCTTTTTCGC | | |
| | AACGGGTTTGCCGCCAGAACACGCGTAAG | | |
| Promoter | CGTGAGGCTCCGGTGCCCGTCAGTGGGCAGAGCGCACATCGCCCACAGTCCCC | 236 nt | 1785 |
| Variant 11 | GAGAAGTTGGGGGGAGGGGTCGGCAATTGAACCGGTGCCTAGAGAAGGTGGCG | | |
| | CGGGGTAAACTGGGAAAGTGATGTCGTGTACTGGCTCCGCCTTTTTCCCGAGG | | |
| | GTGGGGGAGAACCGTATATAAGTGCAGTAGTCGCCGTGAACGTTCTTTTTCGC | | |
| | AACGGGTTTGCCGCCAGAACACAG | | |
| Promoter | GCATGCGTGAGGCTCCGGTGCCCGTCAGTGGGCAGAGCGCACATCGCCCACAG | 246 nt | 1786 |
| Variant 12 | TCCCCGAGAAGTTGGGGGGAGGGGTCGGCAATTGAACCGGTGCCTAGAGAAGG | | |
| | TGGCGCGGGGTAAACTGGGAAAGTGATGTCGTGTACTGGCTCCGCCTTTTTCC | | |
| | CGAGGGTGGGGGAGAACCGTATATAAGTGCAGTAGTCGCCGTGAACGTTCTTT | | |
| | TTCGCAACGGGTTTGCCGCCAGAACACGCGTAAG | | |
| Promoter | GCATGCGTGAGGCTCCGGTGCCCGTCAGTGGGCAGAGCGCACATCGCCCACAG | 241 nt | 1787 |
| Variant 13 | TCCCCGAGAAGTTGGGGGGAGGGGTCGGCAATTGAACCGGTGCCTAGAGAAGG | | |
| | TGGCGCGGGGTAAACTGGGAAAGTGATGTCGTGTACTGGCTCCGCCTTTTTCC | | |
| | CGAGGGTGGGGGAGAACCGTATATAAGTGCAGTAGTCGCCGTGAACGTTCTTT | | |
| | TTCGCAACGGGTTTGCCGCCAGAACACAG | | |
| Promoter | GGTGGAGAAGAGCATGCGTGAGGCTCCGGTGCCCGTCAGTGGGCAGAGCGCAC | 257 nt | 1788 |
| Variant 14 | ATCGCCCACAGTCCCCGAGAAGTTGGGGGGAGGGGTCGGCAATTGAACCGGTG | | |
| | CCTAGAGAAGGTGGCGCGGGGTAAACTGGGAAAGTGATGTCGTGTACTGGCTC | | |
| | CGCCTTTTTCCCGAGGGTGGGGGAGAACCGTATATAAGTGCAGTAGTCGCCGT | | |
| | GAACGTTCTTTTTCGCAACGGGTTTGCCGCCAGAACACGCGTAAG | | |
| Promoter | GGTGGAGAAGAGCATGCGTGAGGCTCCGGTGCCCGTCAGTGGGCAGAGCGCAC | 252 nt | 1789 |
| Variant 15 | ATCGCCCACAGTCCCCGAGAAGTTGGGGGGAGGGGTCGGCAATTGAACCGGTG | | |
| | CCTAGAGAAGGTGGCGCGGGGTAAACTGGGAAAGTGATGTCGTGTACTGGCTC | | |
| | CGCCTTTTTCCCGAGGGTGGGGGAGAACCGTATATAAGTGCAGTAGTCGCCGT | | |
| | GAACGTTCTTTTTCGCAACGGGTTTGCCGCCAGAACACAG | | |
| Promoter | GTCATCACTGAGGTGGAGAAGAGCATGCGTGAGGCTCCGGTGCCCGTCAGTGG | 268 nt | 1790 |
| Variant 16 | GCAGAGCGCACATCGCCCACAGTCCCCGAGAAGTTGGGGGGAGGGGTCGGCAA | | |
| | TTGAACCGGTGCCTAGAGAAGGTGGCGCGGGGTAAACTGGGAAAGTGATGTCG | | |
| | TGTACTGGCTCCGCCTTTTTCCCGAGGGTGGGGGAGAACCGTATATAAGTGCA | | |
| | GTAGTCGCCGTGAACGTTCTTTTTCGCAACGGGTTTGCCGCCAGAACACGCGT | | |
| | AAG | | |
| Promoter | GTCATCACTGAGGTGGAGAAGAGCATGCGTGAGGCTCCGGTGCCCGTCAGTGG | 263 nt | 1791 |
| Variant 18 | GCAGAGCGCACATCGCCCACAGTCCCCGAGAAGTTGGGGGGAGGGGTCGGCAA | | |
| | TTGAACCGGTGCCTAGAGAAGGTGGCGCGGGGTAAACTGGGAAAGTGATGTCG | | |
| | TGTACTGGCTCCGCCTTTTTCCCGAGGGTGGGGGAGAACCGTATATAAGTGCA | | |
| | GTAGTCGCCGTGAACGTTCTTTTTCGCAACGGGTTTGCCGCCAGAACACAG | | |

[0680] In some embodiments, the viral genome comprises an intron. In some embodiments, the viral genome comprises at least two, three, four, or more introns. In some embodiments, the intron is a chimeric intron. In some embodiments, the intron is present 5′ relative to the transgene encoding the NPC protein, e.g., the NPC1 protein. In some embodiments, the intron comprises the nucleotide sequence of SEQ ID NO: 1780, or a nucleotide sequence at least 80%, 85%, 90%, 92%, 95%, 97%, 98%, or 99% identical thereto.

[0681] In some embodiments, the viral genome comprises a Kozak sequence. In some embodiments, the Kozak sequence comprises the nucleotide sequence of SEQ ID NO: 1746, or a nucleotide sequence comprising at least one, two, or three but no more than four modifications, e.g., substitutions, relative to the nucleotide sequence of SEQ ID NO: 1746. In some embodiments, the Kozak sequence is located 5′ relative to the transgene encoding the NPC1 protein. In some embodiments, the Kozak sequence is located immediately adjacent to the 5′ end of the transgene encoding the NPC1 protein.

[0682] In some embodiments, the viral genome comprises a polyadenylation (polyA) signal region. In some embodiments, the viral genome comprises a rabbit globin polyA signal region. In some embodiments, the polyA signal region comprises the nucleotide sequence of SEQ ID NO: 1751, or a nucleotide sequence at least 80%, 85%, 90%, 92%, 95%, 97%, 98%, or 99% identical thereto.

[0683] In some embodiments, the viral genome comprises a nucleic acid comprising a transgene encoding an NPC1 protein, wherein the transgene comprises the nucleotide sequence of any of SEQ ID NO: 1747, 1749, 1750, or a nucleotide sequence substantially identical (e.g., having at least about 70%, 75%, 80%, 85%, 90%, 92%, 95%, 97%, 98%, or 99% sequence identity), to any of the aforesaid nucleotide sequences. In some the transgene comprises the nucleotide sequence of SEQ ID NO: 1749, nucleotide sequence substantially identical (e.g., having at least about 70%, 75%, 80%, 85%, 90%, 92%, 95%, 97%, 98%, or 99% sequence identity) to SEQ ID NO: 1749. In some the transgene comprises the nucleotide sequence of SEQ ID NO: 1750, nucleotide sequence substantially identical (e.g., having at least about 70%, 75%, 80%, 85%, 90%, 92%, 95%, 97%, 98%, or 99% sequence identity) to SEQ ID NO: 1750.

[0684] In some embodiments, the AAV viral genome comprises a 5′ ITR of SEQ ID NO: 1733; a promoter region of SEQ ID NO: 1735, SEQ ID NO: 1736, SEQ ID NO: 1737, SEQ ID NO: 1738, SEQ ID NO: 1739, SEQ ID NO: 1740, SEQ ID NO: 1741, SEQ ID NO: 1742, SEQ ID NO: 1743, SEQ ID NO: 1744, or SEQ ID NO: 1745; a Kozak region of SEQ ID NO: 1746; an NPC protein coding sequence of SEQ ID NO: 1747, SEQ ID NO: 1749, or SEQ ID NO: 1750; a polyA region of SEQ ID NO: 1751; and a 3′ ITR of SEQ ID NO: 1734.

[0685] Tables 4 and 13-17 provide exemplary ITR to ITR sequences for AAV viral genomes according to the present disclosure. In some embodiments, the viral genome comprises one or more additional nucleotide sequences, e.g., one or more nucleotide sequences described in Table 3 or 12, or a nucleotide sequence (e.g., having at least about 70%, 75%, 80%, 85%, 90%, 92%, 95%, 97%, 98%, or 99% sequence identity), to any of the aforesaid sequences.

[0686] In some embodiments, the viral genome of an AAV particle described herein comprises the nucleotide sequence, e.g., the nucleotide sequence from the 5′ ITR to the 3′ ITR, of the nucleotide sequences of ITR_ITR 1-ITR_ITR 44, e.g., as described in Tables 4 or 13-17, or a nucleotide sequence substantially identical (e.g., having at least about 70%, 75%, 80%, 85%, 90%, 92%, 95%, 97%, 98%, or 99% sequence identity) to any of the aforesaid sequences. In some embodiments, the viral genome of an AAV particle described herein comprises the nucleotide sequence, e.g., the nucleic acid sequence from the 5′ ITR to the 3′ ITR, of any of the nucleotide sequences in Table 4 or 13-17, or a nucleotide sequence substantially identical (e.g., having at least about 70%, 75%, 80%, 85%, 90%, 92%, 95%, 97%, 98%, or 99% sequence identity) to any of the aforesaid sequences. In some embodiments, the viral genome of an AAV particle described herein comprises the nucleotide sequence, e.g., the nucleic acid sequence from the 5′ ITR to the 3′ ITR, of any of the nucleotide sequences of SEQ ID NOs: 1752-1759, 1799-1821, or 1824-1836, or a nucleotide sequence substantially identical (e.g., having at least about 70%, 75%, 80%, 85%, 90%, 92%, 95%, 97%, 98%, or 99% sequence identity) to any of the aforesaid sequences.

[0687] This disclosure also provides in some embodiments, an NPC1 protein encoded by any one of SEQ ID NOs: 1752-1759, 1799-1821, or 1824-1836, or a nucleotide sequence substantially identical (e.g., having at least about 70%, 75%, 80%, 85%, 90%, 92%, 95%, 97%, 98%, or 99% sequence identity) to any of the aforesaid sequences.

TABLE 4
Exemplary NPC1 AAV viral genome ITR to ITR sequences

| | | Length of ITR | |
|---|---|---|---|
| ITR to ITR | Description of Region | to ITR | SEQ |
| Construct ID | encoding the NPC Protein | Construct (nts) | ID NO: |
| ITR_ITR 1 | short CMV promoter (SEQ ID NO: 1736); | 4629 | 1752 |
| | WT NPC1 protein coding sequence | | |
| | (SEQ ID NO: 1747) | | |
| ITR_ITR 2 | Promoter Variant 8 (SEQ ID NO: 1782); | 4639 | 1753 |
| | WT NPC1 protein coding sequence | | |
| | (SEQ ID NO: 1747) | | |
| ITR_ITR 3 | Promoter Variant 8 (SEQ ID NO: 1782); pClneo- | 4787 | 1754 |
| | intron; WT NPC1 protein coding sequence | | |
| | (SEQ ID NO: 1747) | | |
| ITR_ITR 4 | Promoter Variant 8 (SEQ ID NO: 1782); codon | 4639 | 1755 |
| | optimized NPC1 protein coding sequence 2 | | |
| | (SEQ ID NO: 1750) | | |
| ITR_ITR 5 | CMV-D3 Promoter (SEQ ID NO: 1739); | 4773 | 1756 |
| | WT NPC1 protein coding sequence | | |
| | (SEQ ID NO: 1747) | | |
| ITR_ITR 6 | Promoter Variant 8 (SEQ ID NO: 1782); codon | 4639 | 1757 |
| | optimized NPC1 protein coding sequence 1 | | |
| | (SEQ ID NO: 1749) | | |
| ITR_ITR 7 | short CBA promoter (SEQ ID NO: 1735); | 4672 | 1758 |
| | WT NPC1 protein coding sequence | | |
| | (SEQ ID NO: 1747) | | |
| ITR_ITR 8 | CBA-D4 promoter (SEQ ID NO: 1738); | 4744 | 1759 |
| | WT NPC1 protein coding sequence | | |
| | (SEQ ID NO: 1747) | | |
| ITR_ITR 9 | Promoter Variant 11 (SEQ ID NO: 1785); codon | 4648 | 1799 |
| | optimized NPC1 protein coding sequence 2 | | |
| | (SEQ ID NO: 1750) | | |
| ITR_ITR 10 | Promoter Variant 11 (SEQ ID NO: 1785); pClneo- | 4796 | 1800 |
| | intron; codon optimized NPC1 protein coding | | |
| | sequence 2 (SEQ ID NO: 1750) | | |
| ITR_ITR 11 | short CMV promoter (SEQ ID NO: 1736); codon | 4629 | 1801 |
| | optimized NPC1 protein coding sequence 2 | | |
| | (SEQ ID NO: 1750) | | |
| ITR_ITR 12 | short CMV promoter (SEQ ID NO: 1736); pClneo- | 4777 | 1802 |
| | intron; codon optimized NPC1 protein coding | | |
| | sequence 2 (SEQ ID NO: 1750) | | |
| ITR_ITR 13 | short CBA promoter (SEQ ID NO: 1735); codon | 4672 | 1803 |
| | optimized NPC1 protein coding sequence 2 | | |
| | (SEQ ID NO: 1750) | | |
| ITR_ITR 14 | Promoter Variant 8 (SEQ ID NO: 1782); pClneo- | 4787 | 1804 |
| | intron; codon optimized NPC1 protein coding | | |
| | sequence 2 (SEQ ID NO: 1750) | | |
| ITR_ITR 15 | short CBA promoter (SEQ ID NO: 1735); codon | 4672 | 1805 |
| | optimized NPC1 protein coding sequence 1 | | |
| | (SEQ ID NO: 1749) | | |
| ITR_ITR 16 | short CMV promoter (SEQ ID NO: 1736); codon | 4629 | 1806 |
| | optimized NPC1 protein coding sequence 1 | | |
| | (SEQ ID NO: 1749) | | |
| ITR_ITR 17 | Promoter Variant 8 (SEQ ID NO: 1782); pClneo- | 4787 | 1807 |
| | intron; codon optimized NPC1 protein coding | | |
| | sequence 1 (SEQ ID NO: 1749) | | |
| ITR_ITR 18 | short CBA promoter (SEQ ID NO: 1735); pClneo- | 4820 | 1808 |
| | intron; WT NPC1 protein coding sequence | | |
| | (SEQ ID NO: 1747) | | |
| ITR_ITR 19 | short CMV promoter (SEQ ID NO: 1736); pClneo- | 4777 | 1809 |
| | intron; WT NPC1 protein coding sequence | | |
| | (SEQ ID NO: 1747) | | |
| ITR_ITR 20 | short CBA promoter (SEQ ID NO: 1735); pClneo- | 4820 | 1810 |
| | intron; codon optimized NPC1 protein coding | | |
| | sequence 2 (SEQ ID NO: 1750) | | |
| ITR_ITR 21 | short CBA promoter (SEQ ID NO: 1735); pClneo- | 4820 | 1811 |
| | intron; codon optimized NPC1 protein coding | | |
| | sequence 1 (SEQ ID NO: 1749) | | |
| ITR_ITR 22 | short CMV promoter (SEQ ID NO: 1736); pClneo- | 4777 | 1812 |
| | intron; codon optimized NPC1 protein coding | | |
| | sequence 1 (SEQ ID NO: 1749) | | |
| ITR_ITR 23 | Promoter Variant 8 (SEQ ID NO: 1782); | 4684 | 1813 |
| | WT NPC1 protein coding sequence | | |
| | (SEQ ID NO: 1747) | | |
| ITR_ITR 24 | Promoter Variant 13 (SEQ ID NO: 1787); pClneo- | 4801 | 1814 |
| | intron; WT NPC1 protein coding sequence | | |
| | (SEQ ID NO: 1747) | | |
| ITR_ITR 25 | Promoter Variant 13 (SEQ ID NO: 1787); codon | 4653 | 1815 |
| | optimized NPC1 protein coding sequence 2 | | |
| | (SEQ ID NO: 1750) | | |
| ITR_ITR 26 | Promoter Variant 13 (SEQ ID NO: 1787); pClneo- | 4801 | 1816 |
| | intron; codon optimized NPC1 protein coding | | |
| | sequence 2 (SEQ ID NO: 1750) | | |
| ITR_ITR 27 | Promoter Variant 11 (SEQ ID NO: 1785); | 4648 | 1817 |
| | WT NPC1 protein coding sequence | | |
| | (SEQ ID NO: 1747) | | |
| ITR_ITR 28 | Promoter Variant 13 (SEQ ID NO: 1787); | 4653 | 1818 |
| | WT NPC1 protein coding sequence | | |
| | (SEQ ID NO: 1747) | | |
| ITR_ITR 29 | Promoter Variant 11 (SEQ ID NO: 1785); pClneo- | 4796 | 1819 |
| | intron; WT NPC1 protein coding sequence | | |
| | (SEQ ID NO: 1747) | | |
| ITR_ITR 30 | Promoter Variant 15 (SEQ ID NO: 1789); | 4664 | 1820 |
| | WT NPC1 protein coding sequence | | |
| | (SEQ ID NO: 1747) | | |
| ITR_ITR 31 | Promoter Variant 18 (SEQ ID NO: 1791); | 4675 | 1821 |
| | WT NPC1 protein coding sequence | | |
| | (SEQ ID NO: 1747) | | |
| ITR_ITR 32 | short CMV promoter (SEQ ID NO: 1736); pClneo- | 4777 | 1824 |
| | intron; codon optimized NPC1 protein coding | | |
| | sequence 2 (SEQ ID NO: 1750) | | |
| ITR_ITR 33 | Promoter Variant 11 (SEQ ID NO: 1785); | 4648 | 1825 |
| | WT NPC1 protein coding sequence | | |
| | (SEQ ID NO: 1747) | | |
| ITR_ITR 34 | Promoter Variant 11 (SEQ ID NO: 1785); pClneo- | 4796 | 1826 |
| | intron; WT NPC1 protein coding sequence | | |
| | (SEQ ID NO: 1747) | | |
| ITR_ITR 35 | Promoter Variant 11 (SEQ ID NO: 1785); codon | 4648 | 1827 |
| | optimized NPC1 protein coding sequence 2 | | |
| | (SEQ ID NO: 1750) | | |
| ITR_ITR 36 | Promoter Variant 11 (SEQ ID NO: 1785); pClneo- | 4796 | 1828 |
| | intron; codon optimized NPC1 protein coding | | |
| | sequence 2 (SEQ ID NO: 1750) | | |
| ITR_ITR 37 | short CMV promoter (SEQ ID NO: 1736); pClneo- | 4777 | 1829 |
| | intron; WT NPC1 protein coding sequence | | |
| | (SEQ ID NO: 1747) | | |
| ITR_ITR 38 | short CMV promoter (SEQ ID NO: 1736); codon | 4629 | 1830 |
| | optimized NPC1 protein coding sequence 2 | | |
| | (SEQ ID NO: 1750) | | |
| ITR_ITR 39 | short CMV promoter (SEQ ID NO: 1736); pClneo- | 4777 | 1831 |
| | intron; codon optimized NPC1 protein coding | | |
| | sequence 2 (SEQ ID NO: 1750 | | |
| ITR_ITR 40 | Promoter Variant 8 (SEQ ID NO: 1782); | 4639 | 1832 |
| | WT NPC1 protein coding sequence | | |
| | (SEQ ID NO: 1747) | | |
| ITR_ITR 41 | CMVie enhancer (SEQ ID NO: 1737); short CBA | 5059 | 1833 |
| | promoter (SEQ ID NO: 1735); WT NPC1 protein | | |
| | coding sequence (SEQ ID NO: 1747) | | |
| ITR_ITR 42 | CBA-D4 Promoter (SEQ ID NO: 1738); | 4824 | 1834 |
| | WT NPC1 protein coding sequence | | |
| | (SEQ ID NO: 1747) | | |
| ITR_ITR 43 | CMV-D4 Promoter (SEQ ID NO: 1740); | 4701 | 1835 |
| | WT NPC1 protein coding sequence | | |
| | (SEQ ID NO: 1747) | | |
| ITR_ITR 44 | CMV-D6 Promoter (SEQ ID NO: 1741); | 4575 | 1836 |
| | WT NPC1 protein coding sequence | | |
| | (SEQ ID NO: 1747) | | |

TABLE 13
Exemplary ITR to ITR sequences encoding an NPC1 protein

| ITR to ITR | | SEQ |
|---|---|---|
| Construct | | ID |
| ID | Sequence | NO: |
| ITR_ITR 9 | ctgcgcgctcgctcgctcactgaggccgcccgggcaaagcccgggcgtcgggcgacctttggtc | 1799 |
| | gcccggcctcagtgagcgagcgagcgcgcagagagggagtggccaactccatcactaggggttc | |
| | cttgtagttaatgattaacccgccatgctacttatctaccagggtaatggggatcctctagaac | |
| | tatagctaacgcgtcgtgaggctccggtgcccgtcagtgggcagagcgcacatcgcccacagtc | |
| | cccgagaagttggggggaggggtcggcaattgaaccggtgcctagagaaggtggcgcggggtaa | |
| | actgggaaagtgatgtcgtgtactggctccgcctttttcccgagggtgggggagaaccgtatat | |
| | aagtgcagtagtcgccgtgaacgttctttttcgcaacgggtttgccgccagaacacagcgggag | |
| | caagcttcgtttcgaaccggtgccgccaccatgaccgccaggggcctggccctgggactgctgc | |
| | tgctgctgctgtgcccagcccaggtgttctctcagagctgcgtgtggtatggcgagtgtggcat | |
| | cgcctacggcgacaagcggtacaactgcgagtacagcggaccacctaagccactgccaaaggac | |
| | ggctacgatctggtgcaggagctgtgccctggcttctttttcggcaacgtgtccctgtgctgtg | |
| | acgtgcggcagctgcagaccctgaaggataatctgcagctgcctctgcagtttctgtctagatg | |
| | cccaagctgtttttataacctgctgaatctgttctgcgagctgacctgttccccaaggcagtct | |
| | cagttcctgaacgtgaccgccacagaggactacgtggatcccgtgacaaaccagaccaagacaa | |
| | atgtgaaggagctgcagtactatgtgggccagagcttcgccaacgccatgtataatgcatgcag | |
| | ggacgtggaggcacccagctccaatgataaggccctgggactgctgtgcggcaaggacgcagat | |
| | gcctgtaacgccaccaattggatcgagtacatgtttaacaaggataatggccaggcccctttca | |
| | ccatcacaccagtgttttccgacttccccgtgcacggcatggagcctatgaacaatgccaccaa | |
| | gggctgcgacgagtctgtggatgaggtgacagccccttgcagctgtcaggattgctccatcgtg | |
| | tgcggacctaagccacagccaccacctccaccagcaccatggaccatcctgggactggacgcca | |
| | tgtatgtgatcatgtggatcacatacatggcctttctgctggtgtttttcggcgcctttttcgc | |
| | cgtgtggtgctatcggaagagatacttcgtgagcgagtacacccccatcgacagcaacatcgcc | |
| | ttcagcgtgaatgcctccgacaagggcgaggcatcctgctgtgatcccgtgagcgccgccttcg | |
| | agggatgcctgcggagactgtttacccggtggggctctttctgcgtgagaaacccaggctgcgt | |
| | gatctttttcagcctggtgtttatcacagcctgttctagcggcctggtgttcgtgagggtgacc | |
| | acaaatccagtggatctgtggagcgccccctcctctcaggcaaggctggagaaggagtactttg | |
| | accagcacttcggcccatttttcaggaccgagcagctgatcatcagggcaccactgacagataa | |
| | gcacatctaccagccatatcctagcggagcagacgtgcccttcggccctccactggatatccag | |
| | atcctgcaccaggtgctggacctgcagatcgccatcgagaacatcaccgcctcctatgacaatg | |
| | agaccgtgacactgcaggatatctgcctggcccctctgagcccatataacaccaattgtacaat | |
| | cctgtccgtgctgaactactttcagaattcccactctgtgctggatcacaagaagggcgacgac | |
| | ttcttcgtgtacgccgactatcacacccacttcctgtactgcgtgcgggcccctgcctctctga | |
| | acgacaccagcctgctgcacgatccatgtctgggcacatttggcggccccgtgttcccttggct | |
| | ggtgctgggcggctatgacgatcagaactacaacaatgccaccgccctggtcatcaccttccct | |
| | gtgaacaattactataatgataccgagaagctgcagagagcccaggcctgggagaaggagttta | |
| | tcaacttcgtgaagaattacaagaacccaaatctgaccatcagcttcacagccgagcggtccat | |
| | cgaggacgagctgaacagagagagcgactccgacgtgttcaccgtggtcatcagctatgccatc | |
| | atgttcctgtacatcagcctggccctgggccacatcaagtcctgcaggcgcctgctggtggata | |
| | gcaaggtgtccctgggcatcgccggcatcctgatcgtgctgagctccgtggcctgttccctggg | |
| | cgtgttctcttatatcggcctgcctctgaccctgatcgtgatcgaagtgatcccatttctggtg | |
| | ctggccgtgggcgtggacaatatcttcatcctggtgcaggcataccagagggacgagcgcctgc | |
| | agggagagacactggatcagcagctgggaagggtgctgggagaggtggcaccatccatgtttct | |
| | gtctagcttctctgagaccgtggcctttttcctgggcgccctgtccgtgatgccagcagtgcac | |
| | acattttctctgttcgccggcctggccgtgtttatcgacttcctgctgcagatcacctgcttcg | |
| | tgagcctgctgggcctggacatcaagaggcaggagaagaaccgcctggatatcttctgctgcgt | |
| | gcggggagcagaggacggcacatccgtgcaggcctctgagagctgtctgttccggtttttcaag | |
| | aattcctattctccactgctgctgaaggactggatgagacccatcgtgatcgccatctttgtgg | |
| | gcgtgctgagcttctccatcgccgtgctgaacaaggtggacatcggcctggatcagtctctgag | |
| | catgcccgacgatagctatatggtggattactttaagtccatctctcagtatctgcacgcagga | |
| | ccccccgtgtacttcgtgctggaggagggccacgactacacctcctctaagggccagaatatgg | |
| | tgtgcggcggcatgggctgtaacaatgattccctggtgcagcagatcttcaacgccgcccagct | |
| | ggacaattatacacggatcggctttgcccccagctcctggatcgacgattacttcgattgggtg | |
| | aagcctcagtctagctgctgtagagtggacaacatcaccgatcagttttgcaatgcaagcgtgg | |
| | tggaccctgcatgcgtgaggtgtaggccactgacaccagagggcaagcagaggccacagggagg | |
| | cgacttcatgcgcttcctgcctatgttcctgtccgacaacccaaatccaaagtgtggcaaggga | |
| | ggacacgcagcatactcctctgccgtgaacatcctgctgggacacggaaccagggtgggagcca | |
| | catacttcatgacctaccacacagtgctgcagacctccgccgacttcatcgatgccctgaagaa | |
| | ggccaggctgatcgcctctaacgtgaccgagacaatgggcatcaatggctctgcctatcgcgtg | |
| | tttccctacagcgtgttttacgtgttctatgagcagtacctgaccatcatcgacgatacaatct | |
| | ttaacctgggcgtgagcctgggcgccatcttcctggtgaccatggtgctgctgggatgcgagct | |
| | gtggtccgccgtgatcatgtgcgccacaatcgccatggtgctggtgaatatgttcggcgtgatg | |
| | tggctgtggggcatcagcctgaacgccgtgtccctggtgaacctggtcatgtcttgcggcatca | |
| | gcgtggagttttgtagccacatcaccagagccttcacagtgtccatgaagggctctcgggtgga | |
| | gagagcagaggaggccctggcacacatgggcagctccgtgttttctggcatcaccctgacaaag | |
| | ttcggcggcatcgtggtgctggcctttgccaagagccagatcttccagatcttttatttccgga | |
| | tgtacctggcaatggtgctgctgggagcaacccacggcctgatctttctgcccgtgctgctgtc | |
| | ttatatcggccctagcgtgaacaaggccaagtcctgcgccaccgaggagagatacaagggcaca | |
| | gagcgggagagactgctgaatttctgactcgaggacggggtgaactacgcctgaggatccgatc | |
| | tttttccctctgccaaaaattatggggacatcatgaagccccttgagcatctgacttctggcta | |
| | ataaaggaaatttattttcattgcaatagtgtgttggaattttttgtgtctctcactcggccta | |
| | ggtagataagtagcatggcgggttaatcattaactacaaggaacccctagtgatggagttggcc | |
| | actccctctctgcgcgctcgctcgctcactgaggccgggcgaccaaaggtcgcccgacgcccgg | |
| | gctttgcccgggcggcctcagtgagcgagcgagcgcgcag | |
| ITR_ITR 10 | ctgcgcgctcgctcgctcactgaggccgcccgggcaaagcccgggcgtcgggcgacctttggtc | 1800 |
| | gcccggcctcagtgagcgagcgagcgcgcagagagggagtggccaactccatcactaggggttc | |
| | cttgtagttaatgattaacccgccatgctacttatctaccagggtaatggggatcctctagaac | |
| | tatagctaacgcgtcgtgaggctccggtgcccgtcagtgggcagagcgcacatcgcccacagtc | |
| | cccgagaagttggggggaggggtcggcaattgaaccggtgcctagagaaggtggcgcggggtaa | |
| | actgggaaagtgatgtcgtgtactggctccgcctttttcccgagggtgggggagaaccgtatat | |
| | aagtgcagtagtcgccgtgaacgttctttttcgcaacgggtttgccgccagaacacagcgggag | |
| | caagcttcgtttagtgaaccggtaagtatcaaggttacaagacaggtttaaggagaccaataga | |
| | aactgggcttgtcgagacagagaagactcttgcgtttctgataggcacctattggtcttactga | |
| | catccactttgcctttctctccacaggggattcgaaccggtgccgccaccatgaccgccagggg | |
| | cctggccctgggactgctgctgctgctgctgtgcccagcccaggtgttctctcagagctgcgtg | |
| | tggtatggcgagtgtggcatcgcctacggcgacaagcggtacaactgcgagtacagcggaccac | |
| | ctaagccactgccaaaggacggctacgatctggtgcaggagctgtgccctggcttctttttcgg | |
| | caacgtgtccctgtgctgtgacgtgcggcagctgcagaccctgaaggataatctgcagctgcct | |
| | ctgcagtttctgtctagatgcccaagctgtttttataacctgctgaatctgttctgcgagctga | |
| | cctgttccccaaggcagtctcagttcctgaacgtgaccgccacagaggactacgtggatcccgt | |
| | gacaaaccagaccaagacaaatgtgaaggagctgcagtactatgtgggccagagcttcgccaac | |
| | gccatgtataatgcatgcagggacgtggaggcacccagctccaatgataaggccctgggactgc | |
| | tgtgcggcaaggacgcagatgcctgtaacgccaccaattggatcgagtacatgtttaacaagga | |
| | taatggccaggcccctttcaccatcacaccagtgttttccgacttccccgtgcacggcatggag | |
| | cctatgaacaatgccaccaagggctgcgacgagtctgtggatgaggtgacagccccttgcagct | |
| | gtcaggattgctccatcgtgtgcggacctaagccacagccaccacctccaccagcaccatggac | |
| | catcctgggactggacgccatgtatgtgatcatgtggatcacatacatggcctttctgctggtg | |
| | tttttcggcgcctttttcgccgtgtggtgctatcggaagagatacttcgtgagcgagtacaccc | |
| | ccatcgacagcaacatcgccttcagcgtgaatgcctccgacaagggcgaggcatcctgctgtga | |
| | tcccgtgagcgccgccttcgagggatgcctgcggagactgtttacccggtggggctctttctgc | |
| | gtgagaaacccaggctgcgtgatctttttcagcctggtgtttatcacagcctgttctagcggcc | |
| | tggtgttcgtgagggtgaccacaaatccagtggatctgtggagcgccccctcctctcaggcaag | |
| | gctggagaaggagtactttgaccagcacttcggcccatttttcaggaccgagcagctgatcatc | |
| | agggcaccactgacagataagcacatctaccagccatatcctagcggagcagacgtgcccttcg | |
| | gccctccactggatatccagatcctgcaccaggtgctggacctgcagatcgccatcgagaacat | |
| | caccgcctcctatgacaatgagaccgtgacactgcaggatatctgcctggcccctctgagccca | |
| | tataacaccaattgtacaatcctgtccgtgctgaactactttcagaattcccactctgtgctgg | |
| | atcacaagaagggcgacgacttcttcgtgtacgccgactatcacacccacttcctgtactgcgt | |
| | gcgggcccctgcctctctgaacgacaccagcctgctgcacgatccatgtctgggcacatttggc | |
| | ggccccgtgttcccttggctggtgctgggcggctatgacgatcagaactacaacaatgccaccg | |
| | ccctggtcatcaccttccctgtgaacaattactataatgataccgagaagctgcagagagccca | |
| | ggcctgggagaaggagtttatcaacttcgtgaagaattacaagaacccaaatctgaccatcagc | |
| | ttcacagccgagcggtccatcgaggacgagctgaacagagagagcgactccgacgtgttcaccg | |
| | tggtcatcagctatgccatcatgttcctgtacatcagcctggccctgggccacatcaagtcctg | |
| | caggcgcctgctggtggatagcaaggtgtccctgggcatcgccggcatcctgatcgtgctgagc | |
| | tccgtggcctgttccctgggcgtgttctcttatatcggcctgcctctgaccctgatcgtgatcg | |
| | aagtgatcccatttctggtgctggccgtgggcgtggacaatatcttcatcctggtgcaggcata | |
| | ccagagggacgagcgcctgcagggagagacactggatcagcagctgggaagggtgctgggagag | |
| | gtggcaccatccatgtttctgtctagcttctctgagaccgtggcctttttcctgggcgccctgt | |
| | ccgtgatgccagcagtgcacacattttctctgttcgccggcctggccgtgtttatcgacttcct | |
| | gctgcagatcacctgcttcgtgagcctgctgggcctggacatcaagaggcaggagaagaaccgc | |
| | ctggatatcttctgctgcgtgcggggagcagaggacggcacatccgtgcaggcctctgagagct | |
| | gtctgttccggtttttcaagaattcctattctccactgctgctgaaggactggatgagacccat | |
| | cgtgatcgccatctttgtgggcgtgctgagcttctccatcgccgtgctgaacaaggtggacatc | |
| | ggcctggatcagtctctgagcatgcccgacgatagctatatggtggattactttaagtccatct | |
| | ctcagtatctgcacgcaggaccccccgtgtacttcgtgctggaggagggccacgactacacctc | |
| | ctctaagggccagaatatggtgtgcggcggcatgggctgtaacaatgattccctggtgcagcag | |
| | atcttcaacgccgcccagctggacaattatacacggatcggctttgcccccagctcctggatcg | |
| | acgattacttcgattgggtgaagcctcagtctagctgctgtagagtggacaacatcaccgatca | |
| | gttttgcaatgcaagcgtggtggaccctgcatgcgtgaggtgtaggccactgacaccagagggc | |
| | aagcagaggccacagggaggcgacttcatgcgcttcctgcctatgttcctgtccgacaacccaa | |
| | atccaaagtgtggcaagggaggacacgcagcatactcctctgccgtgaacatcctgctgggaca | |
| | cggaaccagggtgggagccacatacttcatgacctaccacacagtgctgcagacctccgccgac | |
| | ttcatcgatgccctgaagaaggccaggctgatcgcctctaacgtgaccgagacaatgggcatca | |
| | atggctctgcctatcgcgtgtttccctacagcgtgttttacgtgttctatgagcagtacctgac | |
| | catcatcgacgatacaatctttaacctgggcgtgagcctgggcgccatcttcctggtgaccatg | |
| | gtgctgctgggatgcgagctgtggtccgccgtgatcatgtgcgccacaatcgccatggtgctgg | |
| | tgaatatgttcggcgtgatgtggctgtggggcatcagcctgaacgccgtgtccctggtgaacct | |
| | ggtcatgtcttgcggcatcagcgtggagttttgtagccacatcaccagagccttcacagtgtcc | |
| | atgaagggctctcgggtggagagagcagaggaggccctggcacacatgggcagctccgtgtttt | |
| | ctggcatcaccctgacaaagttcggcggcatcgtggtgctggcctttgccaagagccagatctt | |
| | ccagatcttttatttccggatgtacctggcaatggtgctgctgggagcaacccacggcctgatc | |
| | tttctgcccgtgctgctgtcttatatcggccctagcgtgaacaaggccaagtcctgcgccaccg | |
| | aggagagatacaagggcacagagcgggagagactgctgaatttctgactcgaggacggggtgaa | |
| | ctacgcctgaggatccgatctttttccctctgccaaaaattatggggacatcatgaagcccctt | |
| | gagcatctgacttctggctaataaaggaaatttattttcattgcaatagtgtgttggaattttt | |
| | tgtgtctctcactcggcctaggtagataagtagcatggcgggttaatcattaactacaaggaac | |
| | ccctagtgatggagttggccactccctctctgcgcgctcgctcgctcactgaggccgggcgacc | |
| | aaaggtcgcccgacgcccgggctttgcccgggcggcctcagtgagcgagcgagcgcgcag | |
| ITR_ITR 11 | ctgcgcgctcgctcgctcactgaggccgcccgggcaaagcccgggcgtcgggcgacctttggtc | 1801 |
| | gcccggcctcagtgagcgagcgagcgcgcagagagggagtggccaactccatcactaggggttc | |
| | cttgtagttaatgattaacccgccatgctacttatctaccagggtaatggggatcctctagaac | |
| | tatagctaacgcgtgctattaccatggtgatgcggttttggcagtacatcaatgggcgtggata | |
| | gcggtttgactcacggggatttccaagtctccaccccattgacgtcaatgggagtttgttttgg | |
| | caccaaaatcaacgggactttccaaaatgtcgtaacaactccgccccattgacgcaaatgggcg | |
| | gtaggcgtgtacggtgggaggtctatataagcagagctccgggagcaagcttcgtttcgaaccg | |
| | gtgccgccaccatgaccgccaggggcctggccctgggactgctgctgctgctgctgtgcccagc | |
| | ccaggtgttctctcagagctgcgtgtggtatggcgagtgtggcatcgcctacggcgacaagcgg | |
| | tacaactgcgagtacagcggaccacctaagccactgccaaaggacggctacgatctggtgcagg | |
| | agctgtgccctggcttctttttcggcaacgtgtccctgtgctgtgacgtgcggcagctgcagac | |
| | cctgaaggataatctgcagctgcctctgcagtttctgtctagatgcccaagctgtttttataac | |
| | ctgctgaatctgttctgcgagctgacctgttccccaaggcagtctcagttcctgaacgtgaccg | |
| | ccacagaggactacgtggatcccgtgacaaaccagaccaagacaaatgtgaaggagctgcagta | |
| | ctatgtgggccagagcttcgccaacgccatgtataatgcatgcagggacgtggaggcacccagc | |
| | tccaatgataaggccctgggactgctgtgcggcaaggacgcagatgcctgtaacgccaccaatt | |
| | ggatcgagtacatgtttaacaaggataatggccaggcccctttcaccatcacaccagtgttttc | |
| | cgacttccccgtgcacggcatggagcctatgaacaatgccaccaagggctgcgacgagtctgtg | |
| | gatgaggtgacagccccttgcagctgtcaggattgctccatcgtgtgcggacctaagccacagc | |
| | caccacctccaccagcaccatggaccatcctgggactggacgccatgtatgtgatcatgtggat | |
| | cacatacatggcctttctgctggtgtttttcggcgcctttttcgccgtgtggtgctatcggaag | |
| | agatacttcgtgagcgagtacacccccatcgacagcaacatcgccttcagcgtgaatgcctccg | |
| | acaagggcgaggcatcctgctgtgatcccgtgagcgccgccttcgagggatgcctgcggagact | |
| | gtttacccggtggggctctttctgcgtgagaaacccaggctgcgtgatctttttcagcctggtg | |
| | tttatcacagcctgttctagcggcctggtgttcgtgagggtgaccacaaatccagtggatctgt | |
| | ggagcgccccctcctctcaggcaaggctggagaaggagtactttgaccagcacttcggcccatt | |
| | tttcaggaccgagcagctgatcatcagggcaccactgacagataagcacatctaccagccatat | |
| | cctagcggagcagacgtgcccttcggccctccactggatatccagatcctgcaccaggtgctgg | |
| | acctgcagatcgccatcgagaacatcaccgcctcctatgacaatgagaccgtgacactgcagga | |
| | tatctgcctggcccctctgagcccatataacaccaattgtacaatcctgtccgtgctgaactac | |
| | tttcagaattcccactctgtgctggatcacaagaagggcgacgacttcttcgtgtacgccgact | |
| | atcacacccacttcctgtactgcgtgcgggcccctgcctctctgaacgacaccagcctgctgca | |
| | cgatccatgtctgggcacatttggcggccccgtgttcccttggctggtgctgggcggctatgac | |
| | gatcagaactacaacaatgccaccgccctggtcatcaccttccctgtgaacaattactataatg | |
| | ataccgagaagctgcagagagcccaggcctgggagaaggagtttatcaacttcgtgaagaatta | |
| | caagaacccaaatctgaccatcagcttcacagccgagcggtccatcgaggacgagctgaacaga | |
| | gagagcgactccgacgtgttcaccgtggtcatcagctatgccatcatgttcctgtacatcagcc | |
| | tggccctgggccacatcaagtcctgcaggcgcctgctggtggatagcaaggtgtccctgggcat | |
| | cgccggcatcctgatcgtgctgagctccgtggcctgttccctgggcgtgttctcttatatcggc | |
| | ctgcctctgaccctgatcgtgatcgaagtgatcccatttctggtgctggccgtgggcgtggaca | |
| | atatcttcatcctggtgcaggcataccagagggacgagcgcctgcagggagagacactggatca | |
| | gcagctgggaagggtgctgggagaggtggcaccatccatgtttctgtctagcttctctgagacc | |
| | gtggcctttttcctgggcgccctgtccgtgatgccagcagtgcacacattttctctgttcgccg | |
| | gcctggccgtgtttatcgacttcctgctgcagatcacctgcttcgtgagcctgctgggcctgga | |
| | catcaagaggcaggagaagaaccgcctggatatcttctgctgcgtgcggggagcagaggacggc | |
| | acatccgtgcaggcctctgagagctgtctgttccggtttttcaagaattcctattctccactgc | |
| | tgctgaaggactggatgagacccatcgtgatcgccatctttgtgggcgtgctgagcttctccat | |
| | cgccgtgctgaacaaggtggacatcggcctggatcagtctctgagcatgcccgacgatagctat | |
| | atggtggattactttaagtccatctctcagtatctgcacgcaggaccccccgtgtacttcgtgc | |
| | tggaggagggccacgactacacctcctctaagggccagaatatggtgtgcggcggcatgggctg | |
| | taacaatgattccctggtgcagcagatcttcaacgccgcccagctggacaattatacacggatc | |
| | ggctttgcccccagctcctggatcgacgattacttcgattgggtgaagcctcagtctagctgct | |
| | gtagagtggacaacatcaccgatcagttttgcaatgcaagcgtggtggaccctgcatgcgtgag | |
| | gtgtaggccactgacaccagagggcaagcagaggccacagggaggcgacttcatgcgcttcctg | |
| | cctatgttcctgtccgacaacccaaatccaaagtgtggcaagggaggacacgcagcatactcct | |
| | ctgccgtgaacatcctgctgggacacggaaccagggtgggagccacatacttcatgacctacca | |
| | cacagtgctgcagacctccgccgacttcatcgatgccctgaagaaggccaggctgatcgcctct | |
| | aacgtgaccgagacaatgggcatcaatggctctgcctatcgcgtgtttccctacagcgtgtttt | |
| | acgtgttctatgagcagtacctgaccatcatcgacgatacaatctttaacctgggcgtgagcct | |
| | gggcgccatcttcctggtgaccatggtgctgctgggatgcgagctgtggtccgccgtgatcatg | |
| | tgcgccacaatcgccatggtgctggtgaatatgttcggcgtgatgtggctgtggggcatcagcc | |
| | tgaacgccgtgtccctggtgaacctggtcatgtcttgcggcatcagcgtggagttttgtagcca | |
| | catcaccagagccttcacagtgtccatgaagggctctcgggtggagagagcagaggaggccctg | |
| | gcacacatgggcagctccgtgttttctggcatcaccctgacaaagttcggcggcatcgtggtgc | |
| | tggcctttgccaagagccagatcttccagatcttttatttccggatgtacctggcaatggtgct | |
| | gctgggagcaacccacggcctgatctttctgcccgtgctgctgtcttatatcggccctagcgtg | |
| | aacaaggccaagtcctgcgccaccgaggagagatacaagggcacagagcgggagagactgctga | |
| | atttctgactcgaggacggggtgaactacgcctgaggatccgatctttttccctctgccaaaaa | |
| | ttatggggacatcatgaagccccttgagcatctgacttctggctaataaaggaaatttattttc | |
| | attgcaatagtgtgttggaattttttgtgtctctcactcggcctaggtagataagtagcatggc | |
| | gggttaatcattaactacaaggaacccctagtgatggagttggccactccctctctgcgcgctc | |
| | gctcgctcactgaggccgggcgaccaaaggtcgcccgacgcccgggctttgcccgggcggcctc | |
| | agtgagcgagcgagcgcgcag | |
| ITR_ITR 12 | ctgcgcgctcgctcgctcactgaggccgcccgggcaaagcccgggcgtcgggcgacctttggtc | 1802 |
| | gcccggcctcagtgagcgagcgagcgcgcagagagggagtggccaactccatcactaggggttc | |
| | cttgtagttaatgattaacccgccatgctacttatctaccagggtaatggggatcctctagaac | |
| | tatagctaacgcgtgctattaccatggtgatgcggttttggcagtacatcaatgggcgtggata | |
| | gcggtttgactcacggggatttccaagtctccaccccattgacgtcaatgggagtttgttttgg | |
| | caccaaaatcaacgggactttccaaaatgtcgtaacaactccgccccattgacgcaaatgggcg | |
| | gtaggcgtgtacggtgggaggtctatataagcagagctccgggagcaagcttcgtttagtgaac | |
| | ccgtaagtatcaaggttacaagacaggtttaaggagaccaatagaaactgggcttgtcgagaca | |
| | gagaagactcttgcgtttctgataggcacctattggtcttactgacatccactttgcctttctc | |
| | tccacaggggattcgaaccggtgccgccaccatgaccgccaggggcctggccctgggactgctg | |
| | ctgctgctgctgtgcccagcccaggtgttctctcagagctgcgtgtggtatggcgagtgtggca | |
| | tcgcctacggcgacaagcggtacaactgcgagtacagcggaccacctaagccactgccaaagga | |
| | cggctacgatctggtgcaggagctgtgccctggcttctttttcggcaacgtgtccctgtgctgt | |
| | gacgtgcggcagctgcagaccctgaaggataatctgcagctgcctctgcagtttctgtctagat | |
| | gcccaagctgtttttataacctgctgaatctgttctgcgagctgacctgttccccaaggcagtc | |
| | tcagttcctgaacgtgaccgccacagaggactacgtggatcccgtgacaaaccagaccaagaca | |
| | aatgtgaaggagctgcagtactatgtgggccagagcttcgccaacgccatgtataatgcatgca | |
| | gggacgtggaggcacccagctccaatgataaggccctgggactgctgtgcggcaaggacgcaga | |
| | tgcctgtaacgccaccaattggatcgagtacatgtttaacaaggataatggccaggcccctttc | |
| | accatcacaccagtgttttccgacttccccgtgcacggcatggagcctatgaacaatgccacca | |
| | agggctgcgacgagtctgtggatgaggtgacagccccttgcagctgtcaggattgctccatcgt | |
| | gtgcggacctaagccacagccaccacctccaccagcaccatggaccatcctgggactggacgcc | |
| | atgtatgtgatcatgtggatcacatacatggcctttctgctggtgtttttcggcgcctttttcg | |
| | ccgtgtggtgctatcggaagagatacttcgtgagcgagtacacccccatcgacagcaacatcgc | |
| | cttcagcgtgaatgcctccgacaagggcgaggcatcctgctgtgatcccgtgagcgccgccttc | |
| | gagggatgcctgcggagactgtttacccggtggggctctttctgcgtgagaaacccaggctgcg | |
| | tgatctttttcagcctggtgtttatcacagcctgttctagcggcctggtgttcgtgagggtgac | |
| | cacaaatccagtggatctgtggagcgccccctcctctcaggcaaggctggagaaggagtacttt | |
| | gaccagcacttcggcccatttttcaggaccgagcagctgatcatcagggcaccactgacagata | |
| | agcacatctaccagccatatcctagcggagcagacgtgcccttcggccctccactggatatcca | |
| | gatcctgcaccaggtgctggacctgcagatcgccatcgagaacatcaccgcctcctatgacaat | |
| | gagaccgtgacactgcaggatatctgcctggcccctctgagcccatataacaccaattgtacaa | |
| | tcctgtccgtgctgaactactttcagaattcccactctgtgctggatcacaagaagggcgacga | |
| | cttcttcgtgtacgccgactatcacacccacttcctgtactgcgtgcgggcccctgcctctctg | |
| | aacgacaccagcctgctgcacgatccatgtctgggcacatttggcggccccgtgttcccttggc | |
| | tggtgctgggcggctatgacgatcagaactacaacaatgccaccgccctggtcatcaccttccc | |
| | tgtgaacaattactataatgataccgagaagctgcagagagcccaggcctgggagaaggagttt | |
| | atcaacttcgtgaagaattacaagaacccaaatctgaccatcagcttcacagccgagcggtcca | |
| | tcgaggacgagctgaacagagagagcgactccgacgtgttcaccgtggtcatcagctatgccat | |
| | catgttcctgtacatcagcctggccctgggccacatcaagtcctgcaggcgcctgctggtggat | |
| | agcaaggtgtccctgggcatcgccggcatcctgatcgtgctgagctccgtggcctgttccctgg | |
| | gcgtgttctcttatatcggcctgcctctgaccctgatcgtgatcgaagtgatcccatttctggt | |
| | gctggccgtgggcgtggacaatatcttcatcctggtgcaggcataccagagggacgagcgcctg | |
| | cagggagagacactggatcagcagctgggaagggtgctgggagaggtggcaccatccatgtttc | |
| | tgtctagcttctctgagaccgtggcctttttcctgggcgccctgtccgtgatgccagcagtgca | |
| | cacattttctctgttcgccggcctggccgtgtttatcgacttcctgctgcagatcacctgcttc | |
| | gtgagcctgctgggcctggacatcaagaggcaggagaagaaccgcctggatatcttctgctgcg | |
| | tgcggggagcagaggacggcacatccgtgcaggcctctgagagctgtctgttccggtttttcaa | |
| | gaattcctattctccactgctgctgaaggactggatgagacccatcgtgatcgccatctttgtg | |
| | ggcgtgctgagcttctccatcgccgtgctgaacaaggtggacatcggcctggatcagtctctga | |
| | gcatgcccgacgatagctatatggtggattactttaagtccatctctcagtatctgcacgcagg | |
| | accccccgtgtacttcgtgctggaggagggccacgactacacctcctctaagggccagaatatg | |
| | gtgtgcggcggcatgggctgtaacaatgattccctggtgcagcagatcttcaacgccgcccagc | |
| | tggacaattatacacggatcggctttgcccccagctcctggatcgacgattacttcgattgggt | |
| | gaagcctcagtctagctgctgtagagtggacaacatcaccgatcagttttgcaatgcaagcgtg | |
| | gtggaccctgcatgcgtgaggtgtaggccactgacaccagagggcaagcagaggccacagggag | |
| | gcgacttcatgcgcttcctgcctatgttcctgtccgacaacccaaatccaaagtgtggcaaggg | |
| | aggacacgcagcatactcctctgccgtgaacatcctgctgggacacggaaccagggtgggagcc | |
| | acatacttcatgacctaccacacagtgctgcagacctccgccgacttcatcgatgccctgaaga | |
| | aggccaggctgatcgcctctaacgtgaccgagacaatgggcatcaatggctctgcctatcgcgt | |
| | gtttccctacagcgtgttttacgtgttctatgagcagtacctgaccatcatcgacgatacaatc | |
| | tttaacctgggcgtgagcctgggcgccatcttcctggtgaccatggtgctgctgggatgcgagc | |
| | tgtggtccgccgtgatcatgtgcgccacaatcgccatggtgctggtgaatatgttcggcgtgat | |
| | gtggctgtggggcatcagcctgaacgccgtgtccctggtgaacctggtcatgtcttgcggcatc | |
| | agcgtggagttttgtagccacatcaccagagccttcacagtgtccatgaagggctctcgggtgg | |
| | agagagcagaggaggccctggcacacatgggcagctccgtgttttctggcatcaccctgacaaa | |
| | gttcggcggcatcgtggtgctggcctttgccaagagccagatcttccagatcttttatttccgg | |
| | atgtacctggcaatggtgctgctgggagcaacccacggcctgatctttctgcccgtgctgctgt | |
| | cttatatcggccctagcgtgaacaaggccaagtcctgcgccaccgaggagagatacaagggcac | |
| | agagcgggagagactgctgaatttctgactcgaggacggggtgaactacgcctgaggatccgat | |
| | ctttttccctctgccaaaaattatggggacatcatgaagccccttgagcatctgacttctggct | |
| | aataaaggaaatttattttcattgcaatagtgtgttggaattttttgtgtctctcactcggcct | |
| | aggtagataagtagcatggcgggttaatcattaactacaaggaacccctagtgatggagttggc | |
| | cactccctctctgcgcgctcgctcgctcactgaggccgggcgaccaaaggtcgcccgacgcccg | |
| | ggctttgcccgggcggcctcagtgagcgagcgagcgcgcag | |

[0688] In some embodiments, the viral genome of an AAV particle described herein comprises a nucleotide sequence comprising the all of the components or a combination of the components as described, e.g., in Tables 13-17, or a sequence having at least 70%, 75%, 80%, 85%, 90%, 95%, or 99% sequence identity to any of the aforesaid sequences.

TABLE 14
Sequence Regions in ITR to ITR Sequences

| | ITR_ITR 9 (SEQ ID NO: 1799) | | |
|---|---|---|---|
| | Region SEQ | Region | Position in |
| Sequence Regions | ID NO | length | SEQ ID NO: 1799 |
| 5′ ITR | 1733 | 130 | 1-130 |
| Promoter Variant 11 | 1785 | 236 | 207-442 |
| Kozak | 1746 | 9 | 470-478 |
| NPC protein coding | 1750 | 3837 | 479-4315 |
| sequence 2 | | | |
| PolyA | 1751 | 127 | 4349-4475 |
| 3′ ITR | 1734 | 130 | 4519-4648 |

[0689] In some embodiments, the AAV particle comprises a viral genome comprising the nucleotide sequence of SEQ ID NO: 1799 (ITR_ITR 9), or a nucleotide sequence substantially identical (e.g., having at least 70%, 75%, 80%, 85%, 90%, 95%, 99% or 100%, sequence identity) thereto. In some embodiments, the viral genome comprises the nucleotide sequence of SEQ ID NO: 1799, or a sequence substantially identical (e.g., having at least 70%, 75%, 80%, 85%, 90%, 95%, or 99% sequence identity) thereto. In some embodiments, the viral genome comprising the nucleotide sequence of SEQ ID NO: 1799, comprises in 5′ to 3′ order: a 5′ inverted terminal repeat (ITR) sequence region comprising the nucleotide sequence of SEQ ID NO: 1733 or a nucleotide sequence at least 95% identical thereto; promoter variant 11 comprising the nucleotide sequence of SEQ ID NO: 1785, or a nucleotide sequence at least 95% identical thereto; a Kozak sequence comprising the nucleotide sequence of SEQ ID NO: 1746, or a nucleotide sequence comprising at least one, two, or three but no more than four modifications, e.g., substitutions, relative to the nucleotide sequence of SEQ ID NO: 1746; a nucleotide sequence encoding an NPC1 protein comprising the nucleotide sequence of SEQ ID NO: 1750, or a nucleotide sequence at least 85% (e.g., at least about 90, 92, 95, 96, 97, 98, or 99%) identical thereto; a polyadenylation sequence comprising the nucleotide sequence of SEQ ID NO: 1751, or a nucleotide sequence at least 95% identical thereto; and a 3′ ITR sequence region comprising the nucleotide sequence of SEQ ID NO: 1734, or a nucleotide sequence at least 95% identical thereto.

[0690] In some embodiments, the viral genome comprising the nucleotide sequence of SEQ ID NO: 1799, or a nucleotide sequence substantially identical (e.g., having at least 70%, 75%, 80%, 85%, 90%, 95%, or 99% sequence identity) thereto, encodes an NPC1 protein comprising an amino acid sequence of SEQ ID NO: 1748, or an amino acid sequence substantially identical (e.g., having at least 70%, 75%, 80%, 85%, 90%, 95%, or 99% sequence identity) thereto.

TABLE 15
Sequence Regions in ITR to ITR Sequences

| | ITR_ITR 10 (SEQ ID NO: 1800) | | |
|---|---|---|---|
| | Region SEQ | Region | Position in |
| Sequence Regions | ID NO | length | SEQ ID NO: 1800 |
| 5′ ITR | 1733 | 130 | 1-130 |
| Promoter Variant 11 | 1785 | 236 | 207-442 |
| Intron | 1780 | 133 | 470-602 |
| NPC protein coding | 1750 | 3837 | 627-4463 |
| sequence 2 | | | |
| PolyA | 1751 | 127 | 4497-4623 |
| 3′ ITR | 1734 | 130 | 4667-4796 |

[0691] In some embodiments, the AAV particle comprises a viral genome comprising the nucleotide sequence of SEQ ID NO: 1800 (ITR_ITR 10), or a nucleotide sequence substantially identical (e.g., having at least 70%, 75%, 80%, 85%, 90%, 95%, 99% or 100%, sequence identity) thereto. In some embodiments, the viral genome comprises the nucleotide sequence of SEQ ID NO: 1800, or a sequence substantially identical (e.g., having at least 70%, 75%, 80%, 85%, 90%, 95%, or 99% sequence identity) thereto. In some embodiments, the viral genome comprising the nucleotide sequence of SEQ ID NO: 1800, comprises in 5′ to 3′ order: a 5′ inverted terminal repeat (ITR) sequence region comprising the nucleotide sequence of SEQ ID NO: 1733 or a nucleotide sequence at least 95% identical thereto; promoter variant 11 comprising the nucleotide sequence of SEQ ID NO: 1785, or a nucleotide sequence at least 95% identical thereto; an intron comprising the nucleotide sequence of SEQ ID NO: 1780, or nucleotide sequence at least 95% identical thereto; a nucleotide sequence encoding an NPC1 protein comprising the nucleotide sequence of SEQ ID NO: 1750, or a nucleotide sequence at least 85% (e.g., at least about 90, 92, 95, 96, 97, 98, or 99%) identical thereto; a polyadenylation sequence comprising the nucleotide sequence of SEQ ID NO: 1751, or a nucleotide sequence at least 95% identical thereto; and a 3′ ITR sequence region comprising the nucleotide sequence of SEQ ID NO: 1734, or a nucleotide sequence at least 95% identical thereto.

[0692] In some embodiments, the viral genome comprising the nucleotide sequence of SEQ ID NO: 1800, or a nucleotide sequence substantially identical (e.g., having at least 70%, 75%, 80%, 85%, 90%, 95%, or 99% sequence identity) thereto, encodes an NPC1 protein comprising an amino acid sequence of SEQ ID NO: 1748, or an amino acid sequence substantially identical (e.g., having at least 70%, 75%, 80%, 85%, 90%, 95%, or 99% sequence identity) thereto.

TABLE 16
Sequence Regions in ITR to ITR Sequences

| | ITR_ITR 11 (SEQ ID NO: 1801) | | |
|---|---|---|---|
| | Region SEQ | Region | Position in |
| Sequence Regions | ID NO | length | SEQ ID NO: 1801 |
| 5′ ITR | 1733 | 130 | 1-130 |
| Short CMV Promoter | 1736 | 205 | 219-423 |
| Kozak | 1746 | 9 | 451-459 |
| NPC protein coding | 1750 | 3837 | 460-4296 |
| sequence 2 | | | |
| PolyA | 1751 | 127 | 4330-4456 |
| 3′ ITR | 1734 | 130 | 4500-4629 |

[0693] In some embodiments, the AAV particle comprises a viral genome comprising the nucleotide sequence of SEQ ID NO: 1801 (ITR_ITR 11), or a nucleotide sequence substantially identical (e.g., having at least 70%, 75%, 80%, 85%, 90%, 95%, 99% or 100%, sequence identity) thereto. In some embodiments, the viral genome comprises the nucleotide sequence of SEQ ID NO: 1801, or a sequence substantially identical (e.g., having at least 70%, 75%, 80%, 85%, 90%, 95%, or 99% sequence identity) thereto. In some embodiments, the viral genome comprising the nucleotide sequence of SEQ ID NO: 1801, comprises in 5′ to 3′ order: a 5′ inverted terminal repeat (ITR) sequence region comprising the nucleotide sequence of SEQ ID NO: 1733 or a nucleotide sequence at least 95% identical thereto; a CMV promoter comprising the nucleotide sequence of SEQ ID NO: 1736, or a nucleotide sequence at least 95% identical thereto; a Kozak sequence comprising the nucleotide sequence of SEQ ID NO: 1746, or a nucleotide sequence comprising at least one, two, or three but no more than four modifications, e.g., substitutions, relative to the nucleotide sequence of SEQ ID NO: 1746; a nucleotide sequence encoding an NPC1 protein comprising the nucleotide sequence of SEQ ID NO: 1750, or a nucleotide sequence at least 85% (e.g., at least about 90, 92, 95, 96, 97, 98, or 99%) identical thereto; a polyadenylation sequence comprising the nucleotide sequence of SEQ ID NO: 1751, or a nucleotide sequence at least 95% identical thereto; and a 3′ ITR sequence region comprising the nucleotide sequence of SEQ ID NO: 1734, or a nucleotide sequence at least 95% identical thereto.

[0694] In some embodiments, the viral genome comprising the nucleotide sequence of SEQ ID NO: 1801, or a nucleotide sequence substantially identical (e.g., having at least 70%, 75%, 80%, 85%, 90%, 95%, or 99% sequence identity) thereto, encodes an NPC1 protein comprising an amino acid sequence of SEQ ID NO: 1748, or an amino acid sequence substantially identical (e.g., having at least 70%, 75%, 80%, 85%, 90%, 95%, or 99% sequence identity) thereto.

TABLE 17
Sequence Regions in ITR to ITR Sequences

| | ITR_ITR 12 (SEQ ID NO: 1802) | | |
|---|---|---|---|
| | Region SEQ | Region | Position in |
| Sequence Regions | ID NO | length | SEQ ID NO: 1802 |
| 5′ ITR | 1733 | 130 | 1-130 |
| Short CMV Promoter | 1736 | 205 | 219-423 |
| Intron | 1780 | 133 | 451-583 |
| Kozak | 1746 | 9 | 599-607 |
| NPC protein coding | 1750 | 3837 | 608-4444 |
| sequence 2 | | | |
| PolyA | 1751 | 127 | 4478-4604 |
| 3′ ITR | 1734 | 130 | 4648-4777 |

[0695] In some embodiments, the AAV particle comprises a viral genome comprising the nucleotide sequence of SEQ ID NO: 1802 (ITR_ITR 12), or a nucleotide sequence substantially identical (e.g., having at least 70%, 75%, 80%, 85%, 90%, 95%, 99% or 100%, sequence identity) thereto. In some embodiments, the viral genome comprises the nucleotide sequence of SEQ ID NO: 1802, or a sequence substantially identical (e.g., having at least 70%, 75%, 80%, 85%, 90%, 95%, or 99% sequence identity) thereto. In some embodiments, the viral genome comprising the nucleotide sequence of SEQ ID NO: 1802, comprises in 5′ to 3′ order: a 5′ inverted terminal repeat (ITR) sequence region comprising the nucleotide sequence of SEQ ID NO: 1733 or a nucleotide sequence at least 95% identical thereto; a CMV promoter comprising the nucleotide sequence of SEQ ID NO: 1736, or a nucleotide sequence at least 95% identical thereto; an intron comprising the nucleotide sequence of SEQ ID NO: 1780, or nucleotide sequence at least 95% identical thereto; a Kozak sequence comprising the nucleotide sequence of SEQ ID NO: 1746, or a nucleotide sequence comprising at least one, two, or three but no more than four modifications, e.g., substitutions, relative to the nucleotide sequence of SEQ ID NO: 1746; a nucleotide sequence encoding an NPC1 protein comprising the nucleotide sequence of SEQ ID NO: 1750, or a nucleotide sequence at least 85% (e.g., at least about 90, 92, 95, 96, 97, 98, or 99%) identical thereto; a polyadenylation sequence comprising the nucleotide sequence of SEQ ID NO: 1751, or a nucleotide sequence at least 95% identical thereto; and a 3′ ITR sequence region comprising the nucleotide sequence of SEQ ID NO: 1734, or a nucleotide sequence at least 95% identical thereto.

[0696] In some embodiments, the viral genome comprising the nucleotide sequence of SEQ ID NO: 1802, or a nucleotide sequence substantially identical (e.g., having at least 70%, 75%, 80%, 85%, 90%, 95%, or 99% sequence identity) thereto, encodes an NPC1 protein comprising an amino acid sequence of SEQ ID NO: 1748, or an amino acid sequence substantially identical (e.g., having at least 70%, 75%, 80%, 85%, 90%, 95%, or 99% sequence identity) thereto.

[0697] In some embodiments, the AAV particle comprises an AAV viral genome comprising the nucleotide sequence of any of the viral genomes described herein, e.g., as described in Tables 4 or 13-17, or a nucleotide sequence substantially identical (e.g., having at least about 70%, 75%, 80%, 85%, 90%, 92%, 95%, 97%, 98%, or 99% sequence identity) to any of the aforesaid sequences. In some embodiments, the AAV viral genome further comprises a nucleic acid encoding a capsid protein, e.g., a structural protein. In some embodiments, the capsid protein comprises a VP1 polypeptide, a VP2 polypeptide, and/or a VP3 polypeptide. In some embodiments, the VP1 polypeptide, the VP2 polypeptide, and/or the VP3 polypeptide are encoded by at least one Cap gene. In some embodiments, the AAV viral genome further comprises a nucleic acid encoding a Rep protein, e.g., a non-structural protein. In some embodiments, the Rep protein comprises a Rep78 protein, a Rep68, Rep52 protein, and/or a Rep40 protein. In some embodiments, the Rep78 protein, the Rep68 protein, the Rep52 protein, and/or the Rep40 protein are encoded by at least one Rep gene.

[0698] In some embodiment, the AAV particle comprising a viral comprising the nucleotide sequence of any of the viral genomes described herein, e.g., as described in Tables 4 or 13-17, or a nucleotide sequence substantially identical (e.g., having at least about 70%, 75%, 80%, 85%, 90%, 92%, 95%, 97%, 98%, or 99% sequence identity) to any of the aforesaid sequences comprises, e.g., is packaged in, a capsid protein having a serotype or a functional variant thereof selected from Table 1. In some embodiments, the capsid protein comprise a VOY101, VOY201, AAVPHP.N (PHP.N), AAVPHP.B (PHP.B), AAVPHP.A (PHP.A), PHP.B2, PHP.B3, G2B4, G2B5, AAV9, AAVrh10, or a functional variant thereof. In some embodiments, the capsid protein comprises an AAV9 capsid protein, or functional variant thereof.

[0699] In some embodiments, the AAV particle comprising a viral genome comprising the nucleotide sequence of any of the viral genomes described herein, e.g., as described in Tables 4 or 13-17, or a nucleotide sequence substantially identical (e.g., having at least about 70%, 75%, 80%, 85%, 90%, 92%, 95%, 97%, 98%, or 99% sequence identity) to any of the aforesaid sequences comprises a capsid protein comprising the amino acid sequence of SEQ ID NO: 138, or a sequence substantially identical (e.g., having at least about 70%, 75%, 80%, 85%, 90%, 92%, 95%, 97%, 98%, or 99% sequence identity) thereto. In some embodiments, the capsid protein comprises an amino acid sequence having at least one, two or three modifications, but not more than 30, 20 or 10 modifications of the amino acid sequence of SEQ ID NO: 138. In some embodiments, the capsid protein is encoded by the nucleotide sequence of SEQ ID NO: 137, or a nucleotide sequence substantially identical (e.g., having at least 70%, 75%, 80%, 85%, 90%, 95% or 99%) thereto. In some embodiments, the capsid protein comprises an amino acid substitution at position K449, e.g., a K449R substitution, numbered according to SEQ ID NO:138. In some embodiments, the capsid protein comprises an insert comprising the amino acid sequence of TLAVPFK (SEQ ID NO: 1262), wherein the insert is present immediately subsequent to position 588, relative to a reference sequence numbered according to SEQ ID NO:138. In some embodiments, the capsid protein comprises an amino acid other than “A” at position 587 and/or an amino acid other than “Q” at position 588, numbered according to SEQ ID NO:138. In some embodiments, the capsid protein comprises the amino acid substitution of A587D and/or Q588G, numbered according to SEQ ID NO:138.

[0700] The present disclosure provides in some embodiments, vectors, cells, and/or AAV particles comprising the above identified viral genomes.

### Backbone

[0701] In some embodiments, a cis-element such as a vector backbone is incorporated into the viral particle encoding NPC protein. In some embodiments, the backbone sequence may regulate transcription during viral production. Without wishing to be bound by theory, it is believed, in some embodiments, the backbone sequence may contribute to the stability of NPC protein expression, and/or the level of expression of the NPC protein.

[0702] The present disclosure also provides in some embodiments, a nucleic acid encoding a viral genome, e.g., a viral genome comprising the nucleotide sequence of any of the viral genomes in Table 4 or 13-17, or a nucleotide sequence substantially identical (e.g., having at least 70%, 75%, 80%, 85%, 90%, 95%, 99% or 100%, sequence identity) thereto, an a backbone region suitable for replication of the viral genome in a cell, e.g., a bacterial cell (e.g., wherein the backbone region comprises one or both of a bacterial origin of replication and a selectable marker).

### II. Viral Production

### General Viral Production Process

[0703] Cells for the production of AAV, e.g., rAAV, particles may comprise, in some embodiments, mammalian cells (such as HEK293 cells) and/or insect cells (such as Sf9 cells).

[0704] In various embodiments, AAV production includes processes and methods for producing AAV particles and vectors which can contact a target cell to deliver a payload, e.g. a recombinant viral construct, which includes a nucleotide encoding a payload molecule. In certain embodiments, the viral vectors are adeno-associated viral (AAV) vectors such as recombinant adeno-associated viral (rAAV) vectors. In certain embodiments, the AAV particles are adeno-associated viral (AAV) particles such as recombinant adeno-associated viral (rAAV) particles.

[0705] In some embodiments, disclosed herein is a vector comprising a viral genome of the present disclosure. In some embodiments, disclosed herein is a cell comprising a viral genome of the present disclosure. In some embodiments, the cell is a bacterial cell, a mammalian cell (e.g., a HEK293 cell), or an insect cell (e.g., an Sf9 cell).

[0706] In some embodiments, disclosed herein is a method of making a viral genome. The method comprising providing a nucleic acid encoding a viral genome described herein and a backbone region suitable for replication of the viral genome in a cell, e.g., a bacterial cell (e.g., wherein the backbone region comprises one or both of a bacterial origin of replication and a selectable marker), and excising the viral genome from the backbone region, e.g., by cleaving the nucleic acid molecule at upstream and downstream of the viral genome. In some embodiments, the viral genome comprising a promoter operably linked to nucleic acid comprising a transgene encoding an NPC protein (e.g., an NPC1 protein described herein), will be incorporated into an AAV particle produced in the cell. In some embodiments, the cell is a bacterial cell, a mammalian cell (e.g., a HEK293 cell), or an insect cell (e.g., an Sf9 cell).

[0707] In some embodiments, disclosed herein is a method of making a recombinant AAV particle of the present disclosure, the method comprising (i) providing a host cell comprising a viral genome described herein and incubating the host cell under conditions suitable to enclose the viral genome in a capsid protein, e.g., a capsid protein described herein (e.g., a capsid protein listed in Table 1, e.g., an AAV9 capsid protein or functional variant thereof), thereby making the recombinant AAV particle. In some embodiments, the method comprises prior to step (i), introducing a first nucleic acid comprising the viral genome into a cell. In some embodiments, the host cell comprises a second nucleic acid encoding the capsid protein. In some embodiments, the second nucleic acid is introduced into the host cell prior to, concurrently with, or after the first nucleic acid molecule. In some embodiments, the host cell is a bacterial cell, a mammalian cell (e.g., a HEK293 cell), or an insect cell (e.g., an Sf9 cell).

[0708] In some embodiments, methods are provided herein of producing AAV particles or vectors by (a) contacting a viral production cell with one or more viral expression constructs encoding at least one AAV capsid protein, and one or more payload constructs encoding a payload molecule, which can be selected from: a transgene, a polynucleotide encoding protein, and a modulatory nucleic acid; (b) culturing the viral production cell under conditions such that at least one AAV particle or vector is produced, and (c) isolating the AAV particle or vector from the production stream.

[0709] In these methods, a viral expression construct may encode at least one structural protein and/or at least one non-structural protein. The structural protein may include any of the native or wild type capsid proteins VP1, VP2, and/or VP3, or a chimeric protein thereof. The non-structural protein may include any of the native or wild type Rep78, Rep68, Rep52, and/or Rep40 proteins or a chimeric protein thereof.

[0710] In some embodiments, contacting occurs via transient transfection, viral transduction, and/or electroporation.

[0711] In some embodiments, the viral production cell is selected from a mammalian cell and an insect cell. In certain embodiments, the insect cell includes a Spodoptera frugiperda insect cell. In certain embodiments, the insect cell includes a Sf9 insect cell. In certain embodiments, the insect cell includes a Sf21 insect cell.

[0712] The payload construct vector of the present disclosure may include, in some embodiments, at least one inverted terminal repeat (ITR) and may include mammalian DNA.

[0713] Also provided are AAV particles and viral vectors produced according to the methods described herein.

[0714] In some embodiments, the AAV particles of the present disclosure may be formulated as a pharmaceutical composition with one or more acceptable excipients.

[0715] In certain embodiments, an AAV particle or viral vector may be produced by a method described herein.

[0716] In some embodiments, the AAV particles may be produced by contacting a viral production cell (e.g., an insect cell or a mammalian cell) with at least one viral expression construct encoding at least one capsid protein and at least one payload construct vector. The viral production cell may be contacted by transient transfection, viral transduction, and/or electroporation. The payload construct vector may include a payload construct encoding a payload molecule such as, but not limited to, a transgene, a polynucleotide encoding protein, and a modulatory nucleic acid. The viral production cell can be cultured under conditions such that at least one AAV particle or vector is produced, isolated (e.g., using temperature-induced lysis, mechanical lysis and/or chemical lysis) and/or purified (e.g., using filtration, chromatography, and/or immunoaffinity purification). As a non-limiting example, the payload construct vector may include mammalian DNA.

[0717] In some embodiments, the AAV particles are produced in an insect cell (e.g., Spodoptera frugiperda (Sf9) cell) using a method described herein. As a non-limiting example, the insect cell is contacted using viral transduction which may include baculoviral transduction.

[0718] In some embodiments, the AAV particles are produced in an mammalian cell (e.g., HEK293 cell) using a method described herein. As a non-limiting example, the mammalian cell is contacted using viral transduction which may include multiplasmid transient transfection (such as triple plasmid transient transfection).

[0719] In some embodiments, the AAV particle production method described herein produces greater than 10¹, greater than 10², greater than 10³, greater than 10⁴, or greater than 10⁵ AAV particles in a viral production cell.

[0720] In some embodiments, a process of the present disclosure includes production of viral particles in a viral production cell using a viral production system which includes at least one viral expression construct and at least one payload construct. The at least one viral expression construct and at least one payload construct can be co-transfected (e.g. dual transfection, triple transfection) into a viral production cell. The transfection is completed using standard molecular biology techniques known and routinely performed by a person skilled in the art. The viral production cell provides the cellular machinery necessary for expression of the proteins and other biomaterials necessary for producing the AAV particles, including Rep proteins which replicate the payload construct and Cap proteins which assemble to form a capsid that encloses the replicated payload constructs. The resulting AAV particle is extracted from the viral production cells and processed into a pharmaceutical preparation for administration.

[0721] In various embodiments, once administered, an AAV particle disclosed herein may, without being bound by theory, contact a target cell and enter the cell, e.g., in an endosome. The AAV particles, e.g., those released from the endosome, may subsequently contact the nucleus of the target cell to deliver the payload construct. The payload construct, e.g. recombinant viral construct, may be delivered to the nucleus of the target cell wherein the payload molecule encoded by the payload construct may be expressed.

[0722] In certain embodiments, the process for production of viral particles utilizes seed cultures of viral production cells that include one or more baculoviruses (e.g., a Baculoviral Expression Vector (BEV) or a baculovirus infected insect cell (BIIC) that has been transfected with a viral expression construct and a payload construct vector). In certain embodiments, the seed cultures are harvested, divided into aliquots and frozen, and may be used at a later time point to initiate an infection of a naïve population of production cells.

[0723] In some embodiments, large scale production of AAV particles utilizes a bioreactor. Without being bound by theory, the use of a bioreactor may allow for the precise measurement and/or control of variables that support the growth and activity of viral production cells such as mass, temperature, mixing conditions (impellor RPM or wave oscillation), CO₂ concentration, O₂ concentration, gas sparge rates and volumes, gas overlay rates and volumes, pH, Viable Cell Density (VCD), cell viability, cell diameter, and/or optical density (OD). In certain embodiments, the bioreactor is used for batch production in which the entire culture is harvested at an experimentally determined time point and AAV particles are purified. In some embodiments, the bioreactor is used for continuous production in which a portion of the culture is harvested at an experimentally determined time point for purification of AAV particles, and the remaining culture in the bioreactor is refreshed with additional growth media components.

[0724] In various embodiments, AAV viral particles can be extracted from viral production cells in a process which includes cell lysis, clarification, sterilization and purification. Cell lysis includes any process that disrupts the structure of the viral production cell, thereby releasing AAV particles. In certain embodiments, cell lysis may include thermal shock, chemical, or mechanical lysis methods. Clarification can include the gross purification of the mixture of lysed cells, media components, and AAV particles. In certain embodiments, clarification includes centrifugation and/or filtration, including but not limited to depth end, tangential flow, and/or hollow fiber filtration.

[0725] In various embodiments, the end result of viral production is a purified collection of AAV particles which include two components: (1) a payload construct (e.g. a recombinant AAV viral genome, e.g., vector genome, construct) and (2) a viral capsid.

[0726] In some embodiments, a viral production system or process of the present disclosure includes steps for producing baculovirus infected insect cells (BIICs) using Viral Production Cells (VPC) and plasmid constructs. Viral Production Cells (VPCs) from a Cell Bank (CB) are thawed and expanded to provide a target working volume and VPC concentration. The resulting pool of VPCs is split into a Rep/Cap VPC pool and a Payload VPC pool. One or more Rep/Cap plasmid constructs (viral expression constructs) are processed into Rep/Cap Bacmid polynucleotides and transfected into the Rep/Cap VPC pool. One or more Payload plasmid constructs (payload constructs) are processed into Payload Bacmid polynucleotides and transfected into the Payload VPC pool. The two VPC pools are incubated to produce P1 Rep/Cap Baculoviral Expression Vectors (BEVs) and P1 Payload BEVs. The two BEV pools are expanded into a collection of Plaques, with a single Plaque being selected for Clonal Plaque (CP) Purification (also referred to as Single Plaque Expansion). The process can include a single CP Purification step or can include multiple CP Purification steps either in series or separated by other processing steps. The one-or-more CP Purification steps provide a CP Rep/Cap BEV pool and a CP Payload BEV pool. These two BEV pools can then be stored and used for future production steps, or they can be then transfected into VPCs to produce a Rep/Cap BIIC pool and a Payload BIIC pool.

[0727] In some embodiments, a viral production system or process of the present disclosure includes steps for producing AAV particles using Viral Production Cells (VPC) and baculovirus infected insect cells (BIICs). Viral Production Cells (VPCs) from a Cell Bank (CB) are thawed and expanded to provide a target working volume and VPC concentration. The working volume of Viral Production Cells is seeded into a Production Bioreactor and can be further expanded to a working volume of 200-2000 L with a target VPC concentration for BIIC infection. The working volume of VPCs in the Production Bioreactor is then co-infected with Rep/Cap BIICs and Payload BIICs, with a target VPC:BIIC ratio and a target BIIC:BIIC ratio. VCD infection can also utilize BEVs. The co-infected VPCs are incubated and expanded in the Production Bioreactor to produce a bulk harvest of AAV particles and VPCs.

### Viral Expression Constructs

[0728] In various embodiments, the viral production system of the present disclosure includes one or more viral expression constructs that can be transfected/transduced into a viral production cell. In certain embodiments, a viral expression construct or a payload construct of the present disclosure can be a bacmid, also known as a baculovirus plasmid or recombinant baculovirus genome. In certain embodiments, the viral expression includes a protein-coding nucleotide sequence and at least one expression control sequence for expression in a viral production cell. In certain embodiments, the viral expression includes a protein-coding nucleotide sequence operably linked to least one expression control sequence for expression in a viral production cell. In certain embodiments, the viral expression construct contains parvoviral genes under control of one or more promoters. Parvoviral genes can include nucleotide sequences encoding non-structural AAV replication proteins, such as Rep genes which encode Rep52, Rep40, Rep68, or Rep78 proteins. Parvoviral genes can include nucleotide sequences encoding structural AAV proteins, such as Cap genes which encode VP1, VP2, and VP3 proteins.

[0729] Viral expression constructs of the present disclosure may include any compound or formulation, biological or chemical, which facilitates transformation, transfection, or transduction of a cell with a nucleic acid. Exemplary biological viral expression constructs include plasmids, linear nucleic acid molecules, and recombinant viruses including baculovirus. Exemplary chemical vectors include lipid complexes. Viral expression constructs are used to incorporate nucleic acid sequences into virus replication cells in accordance with the present disclosure. (O'Reilly, David R., Lois K. Miller, and Verne A. Luckow. Baculovirus expression vectors: a laboratory manual. Oxford University Press, 1994); Maniatis et al., eds. Molecular Cloning. CSH Laboratory, NY, N.Y. (1982); and, Philiport and Scluber, eds. Liposomes as tools in Basic Research and Industry. CRC Press, Ann Arbor, Mich. (1995), the contents of each of which are herein incorporated by reference in their entirety as related to viral expression constructs and uses thereof.

[0730] In some embodiments, the viral expression construct is an AAV expression construct which includes one or more nucleotide sequences encoding non-structural AAV replication proteins, structural AAV capsid proteins, or a combination thereof.

[0731] In some embodiments, the viral expression construct of the present disclosure may be a plasmid vector. In certain embodiments, the viral expression construct of the present disclosure may be a baculoviral construct.

[0732] The present disclosure is not limited by the number of viral expression constructs employed to produce AAV particles or viral vectors. In certain embodiments, one, two, three, four, five, six, or more viral expression constructs can be employed to produce AAV particles in viral production cells in accordance with the present disclosure. In certain embodiments of the present disclosure, a viral expression construct may be used for the production of an AAV particles in insect cells. In certain embodiments, modifications may be made to the wild type AAV sequences of the capsid and/or rep genes, for example to improve attributes of the viral particle, such as increased infectivity or specificity, or to enhance production yields.

[0733] In some embodiments, the viral expression construct may contain a nucleotide sequence which includes start codon region, such as a sequence encoding AAV capsid proteins which include one or more start codon regions. In certain embodiments, the start codon region can be within an expression control sequence. The start codon can be ATG or a non-ATG codon (i.e., a suboptimal start codon where the start codon of the AAV VP1 capsid protein is a non-ATG).

[0734] In some embodiments, the viral expression construct used for AAV production may contain a nucleotide sequence encoding the AAV capsid proteins where the initiation codon of the AAV VP1 capsid protein is a non-ATG, i.e., a suboptimal initiation codon, allowing the expression of a modified ratio of the viral capsid proteins in the production system, to provide improved infectivity of the host cell. In a non-limiting example, a viral construct vector may contain a nucleic acid construct comprising a nucleotide sequence encoding AAV VP1, VP2, and VP3 capsid proteins, wherein the initiation codon for translation of the AAV VP1 capsid protein is CTG, TTG, or GTG, as described in U.S. Pat. No. 8,163,543, the contents of which are herein incorporated by reference in their entirety as related to AAV capsid proteins and the production thereof.

[0735] In some embodiments, the viral expression construct of the present disclosure may be a plasmid vector or a baculoviral construct that encodes the parvoviral rep proteins for expression in insect cells. In certain embodiments, a single coding sequence is used for the Rep78 and Rep52 proteins, wherein start codon for translation of the Rep78 protein is a suboptimal start codon, selected from the group consisting of ACG, TTG, CTG, and GTG, that effects partial exon skipping upon expression in insect cells, as described in U.S. Pat. No. 8,512,981, the contents of which are herein incorporated by reference in their entirety, for example to promote less abundant expression of Rep78 as compared to Rep52, which may promote high vector yields.

[0736] In some embodiments, a VP-coding region encodes one or more AAV capsid proteins of a specific AAV serotype. The AAV serotypes for VP-coding regions can be the same or different. In certain embodiments, a VP-coding region can be codon optimized. In certain embodiments, a VP-coding region or nucleotide sequence can be codon optimized for a mammal cell. In certain embodiments, a VP-coding region or nucleotide sequence can be codon optimized for an insect cell. In certain embodiments, a VP-coding region or nucleotide sequence can be codon optimized for a Spodoptera frugiperda cell. In certain embodiments, a VP-coding region or nucleotide sequence can be codon optimized for Sf9 or Sf21 cell lines.

[0737] In some embodiments, a nucleotide sequence encoding one or more VP capsid proteins can be codon optimized to have a nucleotide homology with the reference nucleotide sequence of less than 100%. In certain embodiments, the nucleotide homology between the codon-optimized VP nucleotide sequence and the reference VP nucleotide sequence is less than 100%, less than 99%, less than 98%, less than 97%, less than 96%, less than 95%, less than 94%, less than 93%, less than 92%, less than 91%, less than 90%, less than 89%, less than 88%, less than 87%, less than 86%, less than 85%, less than 84%, less than 83%, less than 82%, less than 81%, less than 80%, less than 78%, less than 76%, less than 74%, less than 72%, less than 70%, less than 68%, less than 66%, less than 64%, less than 62%, less than 60%, less than 55%, less than 50%, and less than 40%.

[0738] In some embodiments, a viral expression construct or a payload construct of the present disclosure can be a bacmid, also known as a baculovirus plasmid or recombinant baculovirus genome. In certain embodiments, a viral expression construct or a payload construct of the present disclosure (e.g. bacmid) can include a polynucleotide incorporated by homologous recombination (transposon donor/acceptor system) into the bacmid by standard molecular biology techniques known and performed by a person skilled in the art.

[0739] In some embodiments, the polynucleotide incorporated into the bacmid (i.e. polynucleotide insert) can include an expression control sequence operably linked to a protein-coding nucleotide sequence. In certain embodiments, the polynucleotide incorporated into the bacmid can include an expression control sequence which includes a promoter, such as p10 or polh, and which is operably linked to a nucleotide sequence which encodes a structural AAV capsid protein (e.g. VP1, VP2, VP3 or a combination thereof). In certain embodiments, the polynucleotide incorporated into the bacmid can include an expression control sequence which includes a promoter, such as p10 or polh, and which is operably linked to a nucleotide sequence which encodes a non-structural AAV capsid protein (e.g. Rep78, Rep52, or a combination thereof).

[0740] The method of the present disclosure is not limited by the use of specific expression control sequences. However, when a certain stoichiometry of VP products are achieved (close to 1:1:10 for VP1, VP2, and VP3, respectively) and also when the levels of Rep52 or Rep40 (also referred to as the p19 Reps) are significantly higher than Rep78 or Rep68 (also referred to as the p5 Reps), improved yields of AAV in production cells (such as insect cells) may be obtained. In certain embodiments, the p5/p19 ratio is below 0.6 more, below 0.4, or below 0.3, but always at least 0.03. These ratios can be measured at the level of the protein or can be implicated from the relative levels of specific mRNAs.

[0741] In some embodiments, AAV particles are produced in viral production cells (such as mammalian or insect cells) wherein all three VP proteins are expressed at a stoichiometry approaching, about or which is: 1:1:10 (VP1:VP2:VP3); 2:2:10 (VP1:VP2:VP3); 2:0:10 (VP1:VP2:VP3); 1-2:0-2:10 (VP1:VP2:VP3); 1-2:1-2:10 (VP1:VP2:VP3); 2-3:0-3:10 (VP1:VP2:VP3); 2-3:2-3:10 (VP1:VP2:VP3); 3:3:10 (VP1:VP2:VP3); 3-5:0-5:10 (VP1:VP2:VP3); or 3-5:3-5:10 (VP1:VP2:VP3).

[0742] In some embodiments, the expression control regions are engineered to produce a VP1:VP2:VP3 ratio selected from the group consisting of: about or exactly 1:0:10; about or exactly 1:1:10; about or exactly 2:1:10; about or exactly 2:1:10; about or exactly 2:2:10; about or exactly 3:0:10; about or exactly 3:1:10; about or exactly 3:2:10; about or exactly 3:3:10; about or exactly 4:0:10; about or exactly 4:1:10; about or exactly 4:2:10; about or exactly 4:3:10; about or exactly 4:4:10; about or exactly 5:5:10; about or exactly 1-2:0-2:10; about or exactly 1-2:1-2:10; about or exactly 1-3:0-3:10; about or exactly 1-3:1-3:10; about or exactly 1-4:0-4:10; about or exactly 1-4:1-4:10; about or exactly 1-5:1-5:10; about or exactly 2-3:0-3:10; about or exactly 2-3:2-3:10; about or exactly 2-4:2-4:10; about or exactly 2-5:2-5:10; about or exactly 3-4:3-4:10; about or exactly 3-5:3-5:10; and about or exactly 4-5:4-5:10.

[0743] In some embodiments of the present disclosure, Rep52 or Rep78 is transcribed from the baculoviral derived polyhedron promoter (polh). Rep52 or Rep78 can also be transcribed from a weaker promoter, for example a deletion mutant of the ie-1 promoter, the Aie-1 promoter, has about 20% of the transcriptional activity of that ie-1 promoter. A promoter substantially homologous to the Δie-1 promoter may be used. In respect to promoters, a homology of at least 50%, 60%, 70%, 80%, 90% or more, is considered to be a substantially homologous promoter.

### Mammalian Cells

[0744] Viral production of the present disclosure disclosed herein describes processes and methods for producing AAV particles or viral vector that contacts a target cell to deliver a payload construct, e.g. a recombinant AAV particle or viral construct, which includes a nucleotide encoding a payload molecule. The viral production cell may be selected from any biological organism, including prokaryotic (e.g., bacterial) cells, and eukaryotic cells, including, insect cells, yeast cells and mammalian cells.

[0745] In certain embodiments, the AAV particles of the present disclosure may be produced in a viral production cell that includes a mammalian cell. Viral production cells may comprise mammalian cells such as A549, WEH1, 3T3, 10T1/2, BHK, MDCK, COS 1, COS 7, BSC 1, BSC 40, BMT 10, VERO, W138, HeLa, HEK293, HEK293T (293T), Saos, C2C12, L cells, HT1080, Huh7, HepG2, C127, 3T3, CHO, HeLa cells, KB cells, BHK and primary fibroblast, hepatocyte, and myoblast cells derived from mammals. Viral production cells can include cells derived from any mammalian species including, but not limited to, human, monkey, mouse, rat, rabbit, and hamster or cell type, including but not limited to fibroblast, hepatocyte, tumor cell, cell line transformed cell, etc.

[0746] AAV viral production cells commonly used for production of recombinant AAV particles include, but is not limited to other mammalian cell lines as described in U.S. Pat. Nos. 6,156,303, 5,387,484, 5,741,683, 5,691,176, 6,428,988 and 5,688,676; U.S. patent application 2002/0081721, and International Patent Publication Nos. WO 00/47757, WO 00/24916, and WO 96/17947, the contents of each of which are herein incorporated by reference in their entireties insofar as they do no conflict with the present disclosure. In certain embodiments, the AAV viral production cells are trans-complementing packaging cell lines that provide functions deleted from a replication-defective helper virus, e.g., HEK293 cells or other Ea trans-complementing cells.

[0747] In some embodiments, the packaging cell line 293-10-3 (ATCC Accession No. PTA-2361) may be used to produce the AAV particles, as described in U.S. Pat. No. 6,281,010, the contents of which are herein incorporated by reference in their entirety as related to the 293-10-3 packaging cell line and uses thereof.

[0748] In some embodiments, of the present disclosure a cell line, such as a HeLA cell line, for trans-complementing E1 deleted adenoviral vectors, which encoding adenovirus Ela and adenovirus E1b under the control of a phosphoglycerate kinase (PGK) promoter can be used for AAV particle production as described in U.S. Pat. No. 6,365,394, the contents of which are incorporated herein by reference in their entirety as related to the HeLa cell line and uses thereof.

[0749] In some embodiments, AAV particles are produced in mammalian cells using a multiplasmid transient transfection method (such as triple plasmid transient transfection). In certain embodiments, the multiplasmid transient transfection method includes transfection of the following three different constructs: (i) a payload construct, (ii) a Rep/Cap construct (parvoviral Rep and parvoviral Cap), and (iii) a helper construct. In certain embodiments, the triple transfection method of the three components of AAV particle production may be utilized to produce small lots of virus for assays including transduction efficiency, target tissue (tropism) evaluation, and stability. In certain embodiments, the triple transfection method of the three components of AAV particle production may be utilized to produce large lots of materials for clinical or commercial applications.

[0750] AAV particles to be formulated may be produced by triple transfection or baculovirus mediated virus production, or any other method known in the art. Any suitable permissive or packaging cell known in the art may be employed to produce the vectors. In certain embodiments, trans-complementing packaging cell lines are used that provide functions deleted from a replication-defective helper virus, e.g., 293 cells or other Ela trans-complementing cells.

[0751] The gene cassette may contain some or all of the parvovirus (e.g., AAV) cap and rep genes. In certain embodiments, some or all of the cap and rep functions are provided in trans by introducing a packaging vector(s) encoding the capsid and/or Rep proteins into the cell. In certain embodiments, the gene cassette does not encode the capsid or Rep proteins. Alternatively, a packaging cell line is used that is stably transformed to express the cap and/or rep genes.

[0752] Recombinant AAV virus particles are, in certain embodiments, produced and purified from culture supernatants according to the procedure as described in US2016/0032254, the contents of which are incorporated by reference in their entirety as related to the production and processing of recombinant AAV virus particles. Production may also involve methods known in the art including those using 293T cells, triple transfection or any suitable production method.

[0753] In some embodiments, mammalian viral production cells (e.g. 293T cells) can be in an adhesion/adherent state (e.g. with calcium phosphate) or a suspension state (e.g. with polyethyleneimine (PEI)). The mammalian viral production cell is transfected with plasmids required for production of AAV, (i.e., AAV rep/cap construct, an adenoviral helper construct, and/or ITR flanked payload construct). In certain embodiments, the transfection process can include optional medium changes (e.g. medium changes for cells in adhesion form, no medium changes for cells in suspension form, medium changes for cells in suspension form if desired). In certain embodiments, the transfection process can include transfection mediums such as DMEM or F17. In certain embodiments, the transfection medium can include serum or can be serum-free (e.g. cells in adhesion state with calcium phosphate and with serum, cells in suspension state with PEI and without serum).

[0754] Cells can subsequently be collected by scraping (adherent form) and/or pelleting (suspension form and scraped adherent form) and transferred into a receptacle. Collection steps can be repeated as necessary for full collection of produced cells. Next, cell lysis can be achieved by consecutive freeze-thaw cycles (−80C to 37C), chemical lysis (such as adding detergent triton), mechanical lysis, or by allowing the cell culture to degrade after reaching ˜0% viability. Cellular debris is removed by centrifugation and/or depth filtration. The samples are quantified for AAV particles by DNase resistant genome titration by DNA qPCR.

[0755] AAV particle titers are measured according to genome copy number (genome particles per milliliter). Genome particle concentrations are based on DNA qPCR of the vector DNA as previously reported (Clark et al. (1999) Hum. Gene Ther., 10:1031-1039; Veldwijk et al. (2002) Mol. Ther., 6:272-278, the contents of which are each incorporated by reference in their entireties as related to the measurement of particle concentrations).

### Insect Cells

[0756] Viral production of the present disclosure includes processes and methods for producing AAV particles or viral vectors that contact a target cell to deliver a payload construct, e.g., a recombinant viral construct, which includes a nucleotide encoding a payload molecule. In certain embodiments, the AAV particles or viral vectors of the present disclosure may be produced in a viral production cell that includes an insect cell.

[0757] Growing conditions for insect cells in culture, and production of heterologous products in insect cells in culture are well-known in the art, see U.S. Pat. No. 6,204,059, the contents of which are herein incorporated by reference in their entirety as related to the growth and use of insect cells in viral production.

[0758] Any insect cell which allows for replication of parvovirus and which can be maintained in culture can be used in accordance with the present disclosure. AAV viral production cells commonly used for production of recombinant AAV particles include, but is not limited to, Spodoptera frugiperda, including, but not limited to the Sf9 or Sf21 cell lines, Drosophila cell lines, or mosquito cell lines, such as Aedes albopictus derived cell lines. Use of insect cells for expression of heterologous proteins is well documented, as are methods of introducing nucleic acids, such as vectors, e.g., insect-cell compatible vectors, into such cells and methods of maintaining such cells in culture. See, for example, Methods in Molecular Biology, ed. Richard, Humana Press, N J (1995); O'Reilly et al., Baculovirus Expression Vectors, A Laboratory Manual, Oxford Univ. Press (1994); Samulski et al., J. Vir. 63:3822-8 (1989); Kajigaya et al., Proc. Nat'l. Acad. Sci. USA 88: 4646-50 (1991); Ruffing et al., J. Vir. 66:6922-30 (1992); Kimbauer et al., Vir. 219:37-44 (1996); Zhao et al., Vir. 272:382-93 (2000); and Samulski et al., U.S. Pat. No. 6,204,059, the contents of each of which are herein incorporated by reference in their entirety as related to the use of insect cells in viral production.

[0759] In some embodiments, the AAV particles are made using the methods described in WO2015/191508, the contents of which are herein incorporated by reference in their entirety insofar as they do not conflict with the present disclosure.

[0760] In some embodiments, insect host cell systems, in combination with baculoviral systems (e.g., as described by Luckow et al., Bio/Technology 6: 47 (1988)) may be used. In certain embodiments, an expression system for preparing chimeric peptide is Trichoplusia ni, Tn 5B1-4 insect cells/baculoviral system, which can be used for high levels of proteins, as described in U.S. Pat. No. 6,660,521, the contents of which are herein incorporated by reference in their entirety as related to the production of viral particles.

[0761] Expansion, culturing, transfection, infection and storage of insect cells can be carried out in any cell culture media, cell transfection media or storage media known in the art, including Hyclone™ SFX-Insect™ Cell Culture Media, Expression System ESF AF™ Insect Cell Culture Medium, ThermoFisher Sf-900II™ media, ThermoFisher Sf-900III™ media, or ThermoFisher Grace's Insect Media. Insect cell mixtures of the present disclosure can also include any of the formulation additives or elements described in the present disclosure, including (but not limited to) salts, acids, bases, buffers, surfactants (such as Poloxamer 188/Pluronic F-68), and other known culture media elements. Formulation additives can be incorporated gradually or as “spikes” (incorporation of large volumes in a short time).

### Baculovirus-Production Systems

[0762] In some embodiments, processes of the present disclosure can include production of AAV particles or viral vectors in a baculoviral system using a viral expression construct and a payload construct vector. In certain embodiments, the baculoviral system includes Baculovirus expression vectors (BEVs) and/or baculovirus infected insect cells (BIICs). In certain embodiments, a viral expression construct or a payload construct of the present disclosure can be a bacmid, also known as a baculovirus plasmid or recombinant baculovirus genome. In some embodiments, a viral expression construct or a payload construct of the present disclosure can be polynucleotide incorporated by homologous recombination (transposon donor/acceptor system) into a bacmid by standard molecular biology techniques known and performed by a person skilled in the art. Transfection of separate viral replication cell populations produces two or more groups (e.g. two, three) of baculoviruses (BEVs), one or more group which can include the viral expression construct (Expression BEV), and one or more group which can include the payload construct (Payload BEV). The baculoviruses may be used to infect a viral production cell for production of AAV particles or viral vector.

[0763] In some embodiments, the process includes transfection of a single viral replication cell population to produce a single baculovirus (BEV) group which includes both the viral expression construct and the payload construct. These baculoviruses may be used to infect a viral production cell for production of AAV particles or viral vector.

[0764] In some embodiments, BEVs are produced using a Bacmid Transfection agent, such as Promega FuGENE® HD, WFI water, or ThermoFisher Cellfectin® II Reagent. In certain embodiments, BEVs are produced and expanded in viral production cells, such as an insect cell.

[0765] In some embodiments, the method utilizes seed cultures of viral production cells that include one or more BEVs, including baculovirus infected insect cells (BIICs). The seed BIICs have been transfected/transduced/infected with an Expression BEV which includes a viral expression construct, and also a Payload BEV which includes a payload construct. In certain embodiments, the seed cultures are harvested, divided into aliquots and frozen, and may be used at a later time to initiate transfection/transduction/infection of a naïve population of production cells. In certain embodiments, a bank of seed BIICs is stored at −80° C. or in LN2 vapor.

[0766] Baculoviruses are made of several essential proteins which are essential for the function and replication of the Baculovirus, such as replication proteins, envelope proteins and capsid proteins. The Baculovirus genome thus includes several essential-gene nucleotide sequences encoding the essential proteins. As a non-limiting example, the genome can include an essential-gene region which includes an essential-gene nucleotide sequence encoding an essential protein for the Baculovirus construct. The essential protein can include: GP64 baculovirus envelope protein, VP39 baculovirus capsid protein, or other similar essential proteins for the Baculovirus construct.

[0767] Baculovirus expression vectors (BEV) for producing AAV particles in insect cells, including but not limited to Spodoptera frugiperda (Sf9) cells, provide high titers of viral vector product. Recombinant baculovirus encoding the viral expression construct and payload construct initiates a productive infection of viral vector replicating cells. Infectious baculovirus particles released from the primary infection secondarily infect additional cells in the culture, exponentially infecting the entire cell culture population in a number of infection cycles that is a function of the initial multiplicity of infection (M.O.I.), see Urabe, M. et al. J Virol. 2006 February; 80(4):1874-85, the contents of which are herein incorporated by reference in their entirety as related to the production and use of BEVs and viral particles.

[0768] Production of AAV particles with baculovirus in an insect cell system may address known baculovirus genetic and physical instability.

[0769] In some embodiments, the production system of the present disclosure addresses baculovirus instability over multiple passages by utilizing a titerless infected-cells preservation and scale-up system. Small scale seed cultures of viral producing cells are transfected with viral expression constructs encoding the structural and/or non-structural components of the AAV particles. Baculovirus-infected viral producing cells are harvested into aliquots that may be cryopreserved in liquid nitrogen; the aliquots retain viability and infectivity for infection of large scale viral producing cell culture. Wasilko D J et al. Protein Expr Purif. 2009 June; 65(2):122-32, the contents of which are herein incorporated by reference in their entirety as related to the production and use of BEVs and viral particles.

[0770] A genetically stable baculovirus may be used to produce a source of the one or more of the components for producing AAV particles in invertebrate cells. In certain embodiments, defective baculovirus expression vectors may be maintained episomally in insect cells. In such embodiments, the corresponding bacmid vector is engineered with replication control elements, including but not limited to promoters, enhancers, and/or cell-cycle regulated replication elements.

[0771] In some embodiments, stable viral producing cells permissive for baculovirus infection are engineered with at least one stable integrated copy of any of the elements necessary for AAV replication and vector production including, but not limited to, the entire AAV genome, Rep and Cap genes, Rep genes, Cap genes, each Rep protein as a separate transcription cassette, each VP protein as a separate transcription cassette, the AAP (assembly activation protein), or at least one of the baculovirus helper genes with native or non-native promoters.

[0772] In some embodiments, the AAV particle of the present disclosure may be produced in insect cells (e.g., Sf9 cells).

[0773] In some embodiments, the AAV particle of the present disclosure may be produced using triple transfection.

[0774] In some embodiments, the AAV particle of the present disclosure may be produced in mammalian cells.

[0775] In some embodiments, the AAV particle of the present disclosure may be produced by triple transfection in mammalian cells.

[0776] In some embodiments, the AAV particle of the present disclosure may be produced by triple transfection in HEK293 cells.

[0777] The AAV viral genomes encoding NPC protein described herein may be useful in the fields of human disease, veterinary applications and a variety of in vivo and in vitro settings. The AAV particles of the present disclosure may be useful in the field of medicine for the treatment, prophylaxis, palliation, or amelioration of neurological or neuromuscular diseases and/or disorders. In some embodiments, the AAV particles of the disclosure are used for the prevention and/or treatment of NPC1.

[0778] Various embodiments of the disclosure herein provide a pharmaceutical composition comprising the AAV particle described herein and a pharmaceutically acceptable excipient.

[0779] Various embodiments of the disclosure herein provide a method of treating a subject in need thereof comprising administering to the subject a therapeutically effective amount of the pharmaceutical composition described herein.

[0780] Some embodiments of the method provide that the subject is treated by a route of administration of the pharmaceutical composition selected from the group consisting of: intravenous, intracerebroventricular, intraparenchymal, intrathecal, subpial, and intramuscular, or a combination thereof. Certain embodiments of the method provide that the subject is treated for NPC1 and/or other neurological disorder arising from a deficiency in the quantity or function of NPC1 and/or NPC2 proteins. In one aspect of the method, a pathological feature of the NPC1 or the other neurological disorder is alleviated and/or the progression of the NPC1 or the other neurological disorder is halted, slowed, ameliorated, or reversed.

[0781] Various embodiments of the disclosure herein describe a method of increasing the level of NPC protein in the central nervous system of a subject in need thereof comprising administering to said subject via infusion, an effective amount of the pharmaceutical composition described herein.

[0782] Also described herein are compositions, methods, processes, kits and devices for the design, preparation, manufacture and/or formulation of AAV particles. In some embodiments, payloads, such as but not limited to payloads comprising NPC protein, may be encoded by payload constructs or contained within plasmids or vectors or recombinant adeno-associated viruses (AAVs).

[0783] The present disclosure also provides administration and/or delivery methods for vectors and viral particles, e.g., AAV particles, for the treatment or amelioration of NPC1. Such methods may involve gene replacement or gene activation. Such outcomes are achieved by utilizing the methods and compositions taught herein.

### III. Pharmaceutical Compositions

[0784] The present disclosure additionally provides a method for treating NPC1 and disorders related to deficiencies in the function or expression of the NPC1 and/or NPC2 protein(s) in a mammalian subject, including a human subject, comprising administering to the subject any of the AAV polynucleotides or AAV genomes described herein (e.g., “vector genomes,” “viral genomes,” or “VGs”) or administering to the subject a particle comprising said AAV polynucleotide or AAV genome, or administering to the subject any of the described compositions, including pharmaceutical compositions.

[0785] As used herein the term “composition” comprises an AAV polynucleotide or AAV genome or AAV particle and at least one excipient.

[0786] As used herein the term “pharmaceutical composition” comprises an AAV polynucleotide or AAV genome or AAV particle and one or more pharmaceutically acceptable excipients.

[0787] Although the descriptions of pharmaceutical compositions, e.g., AAV comprising a payload encoding an NPC protein to be delivered, provided herein are principally directed to pharmaceutical compositions which are suitable for administration to humans, it will be understood by the skilled artisan that such compositions are generally suitable for administration to any other animal, e.g., to non-human animals, e.g. non-human mammals. Modification of pharmaceutical compositions suitable for administration to humans in order to render the compositions suitable for administration to various animals is well understood, and the ordinarily skilled veterinary pharmacologist can design and/or perform such modification with merely ordinary, if any, experimentation. Subjects to which administration of the pharmaceutical compositions is contemplated include, but are not limited to, humans and/or other primates; mammals, including commercially relevant mammals such as cattle, pigs, horses, sheep, cats, dogs, mice, and/or rats; and/or birds, including commercially relevant birds such as poultry, chickens, ducks, geese, and/or turkeys.

[0788] In some embodiments, compositions are administered to humans, human patients, or subjects.

[0789] In some embodiments, the AAV particle formulations described herein may contain a nucleic acid encoding at least one payload. In some embodiments, the formulations may contain a nucleic acid encoding 1, 2, 3, 4, or 5 payloads. In some embodiments, the formulation may contain a nucleic acid encoding a payload construct encoding proteins selected from categories such as, but not limited to, human proteins, veterinary proteins, bacterial proteins, biological proteins, antibodies, immunogenic proteins, therapeutic peptides and proteins, secreted proteins, plasma membrane proteins, cytoplasmic proteins, cytoskeletal proteins, intracellular membrane bound proteins, nuclear proteins, proteins associated with human disease, and/or proteins associated with non-human diseases. In some embodiments, the formulation contains at least three payload constructs encoding proteins. Certain embodiments provide that at least one of the payloads is NPC protein or a variant thereof.

[0790] A pharmaceutical composition in accordance with the present disclosure may be prepared, packaged, and/or sold in bulk, as a single unit dose, and/or as a plurality of single unit doses. As used herein, a “unit dose” refers to a discrete amount of the pharmaceutical composition comprising a predetermined amount of the active ingredient. The amount of the active ingredient is generally equal to the dosage of the active ingredient which would be administered to a subject and/or a convenient fraction of such a dosage such as, for example, one-half or one-third of such a dosage.

### IV. Formulations

[0791] Formulations of the AAV pharmaceutical compositions described herein may be prepared by any method known or hereafter developed in the art of pharmacology. In general, such preparatory methods include the step of bringing the active ingredient into association with an excipient and/or one or more other accessory ingredients, and then, if necessary and/or desirable, dividing, shaping and/or packaging the product into a desired single- or multi-dose unit.

[0792] Relative amounts of the active ingredient, the pharmaceutically acceptable excipient, and/or any additional ingredients in a pharmaceutical composition in accordance with the disclosure will vary, depending upon the identity, size, and/or condition of the subject treated and further depending upon the route by which the composition is to be administered.

[0793] For example, the composition may comprise between 0.1% and 99% (w/w) of the active ingredient. By way of example, the composition may comprise between 0.1% and 100%, e.g., between 0.5% and 50%, between 1-30%, between 5-80%, or at least 80% (w/w) active ingredient.

[0794] The AAV particles of the disclosure can be formulated using one or more excipients to: (1) increase stability; (2) increase cell transfection or transduction; (3) permit the sustained or delayed release; (4) alter the biodistribution (e.g., target the viral particle to specific tissues or cell types); (5) increase the translation of encoded protein in vivo; (6) alter the release profile of encoded protein in vivo and/or (7) allow for regulatable expression of the payload.

[0795] Formulations of the present disclosure can include, without limitation, saline, lipidoids, liposomes, lipid nanoparticles, polymers, lipoplexes, core-shell nanoparticles, peptides, proteins, cells transfected with viral vectors (e.g., for transplantation into a subject), nanoparticle mimics and combinations thereof. Further, the viral vectors of the present disclosure may be formulated using self-assembled nucleic acid nanoparticles.

[0796] In some embodiments, the viral vectors encoding NPC protein may be formulated to optimize baricity and/or osmolality. In some embodiments, the baricity and/or osmolality of the formulation may be optimized to ensure optimal drug distribution in the central nervous system or a region or component of the central nervous system.

[0797] In some embodiments, the AAV particles of the disclosure may be formulated in PBS with 0.001% of pluronic acid (F-68) at a pH of about 7.0.

[0798] In some embodiments, the AAV particles of the disclosure may be formulated in PBS, in combination with an ethylene oxide/propylene oxide copolymer (also known as pluronic or poloxamer).

[0799] In some embodiments, the AAV particles of the disclosure may be formulated in PBS with 0.001% pluronic acid (F-68) (poloxamer 188) at a pH of about 7.0.

[0800] In some embodiments, the AAV particles of the disclosure may be formulated in PBS with 0.001% pluronic acid (F-68) (poloxamer 188) at a pH of about 7.3.

[0801] In some embodiments, the AAV particles of the disclosure may be formulated in PBS with 0.001% pluronic acid (F-68) (poloxamer 188) at a pH of about 7.4.

[0802] In some embodiments, the AAV particles of the disclosure may be formulated in a solution comprising sodium chloride, sodium phosphate and an ethylene oxide/propylene oxide copolymer.

[0803] In some embodiments, the AAV particles of the disclosure may be formulated in a solution comprising sodium chloride, sodium phosphate dibasic, potassium chloride, potassium phosphate monobasic, and poloxamer 188/pluronic acid (F-68).

[0804] In some embodiments, the AAV particles of the disclosure may be formulated in a solution comprising 192 mM sodium chloride, 10 mM sodium phosphate (dibasic), 2.7 mM potassium chloride, 2 mM potassium phosphate (monobasic) and 0.001% pluronic F-68 (v/v), at pH 7.4. This formulation is referred to as Formulation 1 in the present disclosure.

[0805] In some embodiments, the AAV particles of the disclosure may be formulated in a solution comprising about 192 mM sodium chloride, about 10 mM sodium phosphate dibasic and about 0.001% poloxamer 188, at a pH of about 7.3. The concentration of sodium chloride in the final solution may be 150 mM-200 mM. As non-limiting examples, the concentration of sodium chloride in the final solution may be 150 mM, 160 mM, 170 mM, 180 mM, 190 mM or 200 mM. The concentration of sodium phosphate dibasic in the final solution may be 1 mM-50 mM. As non-limiting examples, the concentration of sodium phosphate dibasic in the final solution may be 1 mM, 2 mM, 3 mM, 4 mM, 5 mM, 6 mM, 7 mM, 8 mM, 9 mM, 10 mM, 15 mM, 20 mM, 25 mM, 30 mM, 40 mM, or 50 mM. The concentration of poloxamer 188 (pluronic acid (F-68)) may be 0.0001%-1%. As non-limiting examples, the concentration of poloxamer 188 (pluronic acid (F-68)) may be 0.0001%, 0.0005%, 0.001%, 0.005%, 0.01%, 0.05%, 0.1%, 0.5%, or 1%. The final solution may have a pH of 6.8-7.7. Non-limiting examples for the pH of the final solution include a pH of 6.8, 6.9, 7.0, 7.1, 7.2, 7.3, 7.4, 7.5, 7.6, or 7.7.

[0806] In some embodiments, the AAV particles of the disclosure may be formulated in a solution comprising about 1.05% sodium chloride, about 0.212% sodium phosphate dibasic, heptahydrate, about 0.025% sodium phosphate monobasic, monohydrate, and 0.001% poloxamer 188, at a pH of about 7.4. As a non-limiting example, the concentration of AAV particle in this formulated solution may be about 0.001%. The concentration of sodium chloride in the final solution may be 0.1-2.0%, with non-limiting examples of 0.1%, 0.25%, 0.5%, 0.75%, 0.95%, 0.96%, 0.97%, 0.98%, 0.99%, 1.00%, 1.01%, 1.02%, 1.03%, 1.04%, 1.05%, 1.06%, 1.07%, 1.08%, 1.09%, 1.10%, 1.25%, 1.5%, 1.75%, or 2%. The concentration of sodium phosphate dibasic in the final solution may be 0.100-0.300% with non-limiting examples including 0.100%, 0.125%, 0.150%, 0.175%, 0.200%, 0.210%, 0.211%, 0.212%, 0.213%, 0.214%, 0.215%, 0.225%, 0.250%, 0.275%, 0.300%. The concentration of sodium phosphate monobasic in the final solution may be 0.010-0.050%, with non-limiting examples of 0.010%, 0.015%, 0.020%, 0.021%, 0.022%, 0.023%, 0.024%, 0.025%, 0.026%, 0.027%, 0.028%, 0.029%, 0.030%, 0.035%, 0.040%, 0.045%, or 0.050%. The concentration of poloxamer 188 (pluronic acid (F-68)) may be 0.0001%-1%. As non-limiting examples, the concentration of poloxamer 188 (pluronic acid (F-68)) may be 0.0001%, 0.0005%, 0.001%, 0.005%, 0.01%, 0.05%, 0.1%, 0.5%, or 1%. The final solution may have a pH of 6.8-7.7. Non-limiting examples for the pH of the final solution include a pH of 6.8, 6.9, 7.0, 7.1, 7.2, 7.3, 7.4, 7.5, 7.6, or 7.7.

### Excipients

[0807] The formulations of the disclosure can include one or more excipients, each in an amount that together increases the stability of the AAV particle, increases cell transfection or transduction by the viral particle, increases the expression of viral particle encoded protein, and/or alters the release profile of AAV particle encoded proteins. In some embodiments, a pharmaceutically acceptable excipient may be at least 95%, at least 96%, at least 97%, at least 98%, at least 99%, or 100% pure. In some embodiments, an excipient is approved for use for humans and for veterinary use. In some embodiments, an excipient may be approved by United States Food and Drug Administration. In some embodiments, an excipient may be of pharmaceutical grade. In some embodiments, an excipient may meet the standards of the United States Pharmacopoeia (USP), the European Pharmacopoeia (EP), the British Pharmacopoeia, and/or the International Pharmacopoeia.

[0808] Excipients, which, as used herein, include, but are not limited to, any and all solvents, dispersion media, diluents, or other liquid vehicles, dispersion or suspension aids, surface active agents, isotonic agents, thickening or emulsifying agents, preservatives, and the like, as suited to the particular dosage form desired. Various excipients for formulating pharmaceutical compositions and techniques for preparing the composition are known in the art (see Remington: The Science and Practice of Pharmacy, 21st Edition, A. R. Gennaro, Lippincott, Williams & Wilkins, Baltimore, Md., 2006; the contents of which are herein incorporated by reference in their entirety). The use of a conventional excipient medium may be contemplated within the scope of the present disclosure, except insofar as any conventional excipient medium may be incompatible with a substance or its derivatives, such as by producing any undesirable biological effect or otherwise interacting in a deleterious manner with any other component(s) of the pharmaceutical composition.

### Inactive Ingredients

[0809] In some embodiments, AAV formulations may comprise at least one excipient which is an inactive ingredient. As used herein, the term “inactive ingredient” refers to one or more agents that do not contribute to the activity of the pharmaceutical composition included in formulations. In some embodiments, all, none, or some of the inactive ingredients which may be used in the formulations of the present disclosure may be approved by the US Food and Drug Administration (FDA).

[0810] Formulations of AAV particles disclosed herein may include cations or anions. In some embodiments, the formulations include metal cations such as, but not limited to, Zn²⁺, Ca²⁺, Cu²⁺, Mg⁺, or combinations thereof. In some embodiments, formulations may include polymers or polynucleotides complexed with a metal cation (see, e.g., U.S. Pat. Nos. 6,265,389 and 6,555,525, the contents of each of which are herein incorporated by reference in their entirety).

### V. Uses and Applications

[0811] The compositions of the disclosure (e.g., a viral genome or AAV particle comprising a viral genome described herein) may be administered to a subject or used in the manufacture of a medicament for the delivery of an exogenous NPC1 protein to a subject. The compositions of the disclosure (e.g., a viral genome or AAV particle described herein) may be administered to a subject or used in the manufacture of a medicament for administration to a subject having or diagnosed with having a disease associated with NPC, e.g., NPC1, expression (e.g., a lysosomal storage disease, e.g., Niemann-Pick disease, type C1), a deficiency in the quantity or function of NPC protein or having a disease or condition associated with decreased NPC protein expression. In some embodiments, the disease is NPC1. In some embodiments, the AAV particles including NPC protein may be administered to a subject to treat NPC1. In some embodiments, administration of the AAV particles comprising viral genomes that encode NPC protein may protect central nervous system pathways from degeneration. In some embodiments, the subject has, has been diagnosed with having, or is at risk of having a disease associated with expression of NPC1, e.g., aberrant or reduced NPC1 expression, e.g., expression of an NPC1 gene, NPC1 mRNA, and/or NPC1 protein. In some embodiments, the subject has, has been diagnosed with having, or is at risk of having a lysosomal storage disease or Niemann-Pick disease, type C1.

[0812] In some embodiments, the delivery of the AAV particles results in amelioration of at least one symptom of the disease associated with NPC1 expression, the lysosomal storage disease, and/or Niemann-Pick disease, type C1 in the subject.

[0813] In some embodiments, the delivery of the AAV particles may halt or slow progression of NPC1 as measured by cholesterol accumulation in CNS cells (as determined, for example, by filipin staining and quantification). In some embodiments, the delivery of the AAV particles may halt or slow accumulation of unesterified cholesterol in NPC1-patient brain and other tissues. Accumulation of unesterified cholesterol in NPC1 patients (as opposed to free cholesterol) contributes to NPC1 disease pathology. Non-enzymatic degradation of cholesterol results in accumulated unesterified cholesterol. Thus, in some embodiments, the delivery of the AAV particles may reduce the adverse effects contributed by accumulation of unesterified cholesterol in NPC1 patients.

[0814] In some embodiments, the delivery of the AAV particles improves symptoms of NPC1, including, for example, cognitive, muscular, physical, and sensory symptoms of NPC1.

[0815] In some embodiments, the present disclosure encompasses the delivery of pharmaceutical, prophylactic, diagnostic, or imaging compositions in combination with agents that may improve their bioavailability, reduce and/or modify their metabolism, and/or modify their distribution within the body.

[0816] In some embodiments, the pharmaceutical compositions described herein are used as research tools, particularly in in vitro investigations using human cell lines such as HEK293T and in vivo testing in nonhuman primates which will occur prior to human clinical trials.

[0817] In some embodiments, the method further comprises performing a blood test, an imaging test, a CNS biopsy sample, or an aqueous cerebral spinal fluid biopsy and/or evaluating, e.g., measuring, the level of NPC1 expression, e.g., NPC1 gene, NPC1 mRNA, and/or NPC1 protein expression in a subject, e.g., in a cell or tissue of the subject, optionally wherein the level of NPC1 protein is measured by an assay described herein, e.g., an ELISA, a Western blot, or an immunohistochemistry assay. In some embodiments, measuring the level of NPC1 expression is performed prior to, during, or subsequent to treatment with the AAV particle comprising an AAV viral genome described herein. In some embodiments, the administration of the AAV viral particle comprising an AAV viral genome described herein results in increased level of NPC1 protein expression (e.g., 0.5×-20.0× more NPC protein expression, e.g., 2-fold, 3-fold, 4-fold, 5-fold, 6-fold, 7-fold, 8-fold, 9-fold, 10-fold, 15-fold, 20-fold more NPC1 protein expression) in a cell of the subject, relative to reference level, e.g., a subject that has not received treatment, e.g., has not been administered the AAV particle. In some embodiments, the administration of the AAV viral particle comprising an AAV viral genome described herein results reduction of cholesterol accumulation in CNS cells (e.g. as measured by filipin staining, HP-β-Calbindin D staining, and quantification), as compared to a reference level, e.g., a subject that has not received treatment, e.g., has not been administered the AAV particle.

### CNS Diseases

[0818] The present disclosure provides a method for treating a disease, disorder and/or condition in a mammalian subject, including a human subject, comprising administering to the subject any of the viral particles e.g., AAV, AAV particle, or AAV genome that produces NPC protein described herein (i.e., viral genomes or “VG”) or administering to the subject a particle comprising said AAV particle or AAV genome, or administering to the subject any of the described compositions, including pharmaceutical compositions.

[0819] In some embodiments, AAV particles of the present disclosure, through delivery of a functional payload that is a therapeutic product comprising an NPC protein or variant thereof that can modulate the level or function of a gene product in the CNS.

[0820] A functional payload may alleviate or reduce symptoms that result from abnormal level and/or function of a gene product (e.g., an absence or defect in a protein) in a subject in need thereof or that otherwise confers a benefit to a CNS disorder in a subject in need thereof.

[0821] As non-limiting examples, companion or combination therapeutic products delivered by AAV particles of the present disclosure may include, but are not limited to, growth and trophic factors, cytokines, hormones, neurotransmitters, enzymes, anti-apoptotic factors, angiogenic factors, NPC proteins, and any protein known to be mutated in pathological disorders such as NPC1.

[0822] In some embodiments, AAV particles of the present disclosure may be used to treat diseases that are associated with impairments of the growth and development of the CNS, i.e., neurodevelopmental disorders. In some aspects, such neurodevelopmental disorders may be caused by genetic mutations.

[0823] In some embodiments, the neurological disorders may be functional neurological disorders with motor and/or sensory symptoms which have neurological origin in the CNS. As non-limiting examples, functional neurological disorders may be chronic pain, seizures, speech problems, involuntary movements, or sleep disturbances.

[0824] In some embodiments, the neurological or neuromuscular disease, disorder, and/or condition is NPC1. In some embodiments, the delivery of the AAV particles may halt or slow the disease progression of NPC1 by 10%, 20%, 30%, 40%, 50%, 60%, 70%, 80%, 90%, 95%, or more than 95% using a known analysis method and comparator group for NPC1. As a non-limiting example, the delivery of the AAV particles may halt or slow progression of NPC1 as measured by cholesterol accumulation in CNS cells (as determined, for example, by filipin staining and quantification).

[0825] In some embodiments, the AAV particle encoding a payload may increase the amount of NPC protein in a tissue by 1%, 2%, 3%, 4%, 5%, 6%, 7%, 8%, 9%, 10%, 11%, 12%, 13%, 14%, 15%, 16%, 17%, 18%, 19%, 20%, 25%, 30%, 35%, 40%, 45%, 50%, 55%, 60%, 65%, 70%, 75%, 80%, 85%, 90%, 95%, 97%, 99%, or more than 100%. In some embodiments, the AAV particle encoding a payload may increase the amount of NPC protein in a tissue to be comparable to (e.g., approximately the same as) the amount of NPC protein in the corresponding tissue of a healthy subject. In some embodiments, the AAV particle encoding a payload may increase the amount of NPC protein in a tissue effective to reduce one or more symptoms of a disease associated with decreased NPC protein expression or a deficiency in the quantity and/or function of NPC protein, e.g., NPC1.

Neonates with Genetically Confirmed NPC1

[0826] In some embodiments, the delivery of the AAV particles as described herein is useful as a vector-based (e.g., AAV9) gene therapy for the treatment of neonates with genetically confirmed NPC1. Early neonatal onset presents with clinical symptoms of NPC1 within 3 months to 2 years of age. Delivery of the AAV particles as described herein may halt or slow the progressive neurological and clinical decline of neonatal onset NPC1. Primary efficacy endpoints of treatment using the AAV particles described herein include improved results in percentage of Motor Milestones Responders on Hammersmith Infant Neurological Examination (HINE) assessment and improved rate of slowing or normalization of age appropriate development milestones. Secondary efficacy endpoints of treatment using the AAV particles described herein include reduced Time to Death or Permanent Ventilation, improved Child Brain Function including Resting Brain Function (Alpha, Gamma and Theta power, Decreased Seizure count), and improved Body Mass Index, Maternal Physiological Stress, and Maternal Hair Cortisol readouts. Additional efficacy endpoints may include improved readouts of neurodegeneration biomarkers including biofluid (plasma/CSF) markers of neurodegeneration (e.g., NfL), improved imaging readouts including volumetric MRII of the cerebellum and whole brain. Pharmacodynamic assessments efficacy may include quantification of markers of cholesterol metabolism (including plasma oxysterols lyso-SM-509 and others), and CSF levels of HP—O-Calbindin D. In some embodiments, safety and tolerability of treatment using the AAV particles as described herein include acceptable incidence of adverse events (AEs) attributable to the treatment, inpatient observation after dosing, and continued monitoring for antibody- and cell-mediated immune response to the treatment. Contraindications may include presence of neutralizing antibodies at a titer greater than, for example, 1:50.

### Juvenile Onset NPC1

[0827] In some embodiments, the delivery of the AAV particles as described herein is useful as a vector-based (e.g., AAV9) gene therapy for the treatment of juvenile onset NPC1. Juvenile onset NPC1 presents with clinical symptoms of NPC1 at 6 to 15 years of age, with mean life expectation of 24 years. Delivery of the AAV particles as described herein may halt or slow the progressive neurological and clinical decline of juvenile onset NPC1. Primary efficacy endpoints of treatment using the AAV particles described herein include clinically meaningful improvements in mean rate of disease progression, e.g., statistically significant improvement as compared to untreated control populations or current standard of care treatment at 18 to 24 months post treatment. Secondary efficacy endpoints of treatment using the AAV particles described herein include improved neurologic and/or functional readouts such as Inventory of Non-Ataxia Signs (INAS), SCA Functional Index or SARA, as well as improvements in cognitive impairment (school performance, language and learning), improvement of gelastic cataplexy seizure severity and frequency, improved quality of life, and others, and improved readouts of full neuropsychiatric assessment. Additional efficacy endpoints may include improved readouts of neurodegeneration biomarkers including biofluid (plasma/CSF) markers of neurodegeneration (e.g., NfL), improved imaging readouts including volumetric MRII of the cerebellum and whole brain. Pharmacodynamic assessments efficacy may include quantification of markers of cholesterol metabolism (including plasma oxysterols lyso-SM-509 and others), and CSF levels of HP-β-Calbindin D. In some embodiments, safety and tolerability of treatment using the AAV particles as described herein include acceptable incidence of adverse events (AEs) attributable to the treatment, inpatient observation after dosing, and continued monitoring for antibody- and cell-mediated immune response to the treatment. Contraindications may include presence of neutralizing antibodies at a titer greater than, for example, 1:50.

### VI. Dosing and Administration

### Administration

[0828] In some aspects, the present disclosure provides administration and/or delivery methods for vectors and viral particles, e.g., AAV particles, encoding NPC protein or a variant thereof, for the prevention, treatment, or amelioration of diseases or disorders of the CNS. For example, administration of the AAV particles prevents, treats, or ameliorates NPC1. Thus, robust widespread NPC protein distribution throughout the CNS and periphery is desired for maximal efficacy. Particular target tissues for administration or delivery include CNS tissues, brain tissue, and, more specifically, caudate-putamen, thalamus, superior colliculus, cortex, and corpus collosum.

[0829] The AAV particles of the present disclosure may be administered by any route which results in a therapeutically effective outcome. These include, but are not limited to, enteral (into the intestine), gastroenteral, epidural (into the dura matter), oral (by way of the mouth), transdermal, peridural, intracerebral (into the cerebrum), intracerebroventricular (into the cerebral ventricles), intracranial (into the skull), picutaneous (application onto the skin), intradermal, (into the skin itself), subcutaneous (under the skin), nasal administration (through the nose), intravenous (into a vein), intravenous bolus, intravenous drip, intraarterial (into an artery), intramuscular (into a muscle), intracardiac (into the heart), intraosseous infusion (into the bone marrow), intraparenchymal (into the substance of), intrathecal (into the spinal canal), intraperitoneal, (infusion or injection into the peritoneum), intravesicular infusion, intravitreal, (through the eye), intracavernous injection (into a pathologic cavity) intracavitary (into the base of the penis), intravaginal administration, intrauterine, extra-amniotic administration, transdermal (diffusion through the intact skin for systemic distribution), transmucosal (diffusion through a mucous membrane), transvaginal, insufflation (snorting), sublingual, sublabial, enema, eye drops (onto the conjunctiva), in ear drops, auricular (in or by way of the ear), buccal (directed toward the cheek), conjunctival, cutaneous, dental (to a tooth or teeth), electro-osmosis, endocervical, endosinusial, endotracheal, extracorporeal, hemodialysis, infiltration, interstitial, intra-abdominal, intra-amniotic, intra-articular, intrabiliary, intrabronchial, intrabursal, intracartilaginous (within a cartilage), intracaudal (within the cauda equine), intracisternal (within the cisterna magna cerebellomedularis), intracorneal (within the cornea), dental intracoronal, intracoronary (within the coronary arteries), intracorporus cavernosum (within the dilatable spaces of the corporus cavernosa of the penis), intradiscal (within a disc), intraductal (within a duct of a gland), intraduodenal (within the duodenum), intradural (within or beneath the dura), intraepidermal (to the epidermis), intraesophageal (to the esophagus), intragastric (within the stomach), intragingival (within the gingivae), intraileal (within the distal portion of the small intestine), intralesional (within or introduced directly to a localized lesion), intraluminal (within a lumen of a tube), intralymphatic (within the lymph), intramedullary (within the marrow cavity of a bone), intrameningeal (within the meninges), intraocular (within the eye), intraovarian (within the ovary), intrapericardial (within the pericardium), intrapleural (within the pleura), intraprostatic (within the prostate gland), intrapulmonary (within the lungs or its bronchi), intrasinal (within the nasal or periorbital sinuses), intraspinal (within the vertebral column), intrasynovial (within the synovial cavity of a joint), intratendinous (within a tendon), intratesticular (within the testicle), intrathecal (within the cerebrospinal fluid at any level of the cerebrospinal axis), intrathoracic (within the thorax), intratubular (within the tubules of an organ), intratumor (within a tumor), intratympanic (within the aurus media), intravascular (within a vessel or vessels), intraventricular (within a ventricle), iontophoresis (by means of electric current where ions of soluble salts migrate into the tissues of the body), irrigation (to bathe or flush open wounds or body cavities), laryngeal (directly upon the larynx), nasogastric (through the nose and into the stomach), occlusive dressing technique (topical route administration which is then covered by a dressing which occludes the area), ophthalmic (to the external eye), oropharyngeal (directly to the mouth and pharynx), parenteral, percutaneous, periarticular, peridural, perineural, periodontal, rectal, respiratory (within the respiratory tract by inhaling orally or nasally for local or systemic effect), retrobulbar (behind the pons or behind the eyeball), soft tissue, subarachnoid, subconjunctival, submucosal, subpial, topical, transplacental (through or across the placenta), transtracheal (through the wall of the trachea), transtympanic (across or through the tympanic cavity), ureteral (to the ureter), urethral (to the urethra), vaginal, caudal block, diagnostic, nerve block, biliary perfusion, cardiac perfusion, photopheresis or spinal.

[0830] In some embodiments, AAV particles of the present disclosure are administered so as to be delivered to a target cell or tissue. Delivery to a target cell results in NPC protein expression. A target cell may be any cell in which it is considered desirable to increase NPC protein expression levels. A target cell may be a CNS cell. Non-limiting examples of such cells and/or tissues include, dorsal root ganglia and dorsal columns, proprioceptive sensory neurons, Clark's column, gracile and cuneate nuclei, cerebellar dentate nucleus, corticospinal tracts and the cells comprising the same, Betz cells, and cells of the heart.

[0831] In some embodiments, compositions may be administered in a way that allows them to cross the blood-brain barrier, vascular barrier, or other epithelial barrier.

[0832] In some embodiments, delivery of NPC protein by adeno-associated virus (AAV) particles to cells of the central nervous system (e.g., parenchyma) comprises infusion into cerebrospinal fluid (CSF). CSF is produced by specialized ependymal cells that comprise the choroid plexus located in the ventricles of the brain. CSF produced within the brain then circulates and surrounds the central nervous system including the brain and spinal cord. CSF continually circulates around the central nervous system, including the ventricles of the brain and subarachnoid space that surrounds both the brain and spinal cord, while maintaining a homeostatic balance of production and reabsorption into the vascular system. The entire volume of CSF is replaced approximately four to six times per day or approximately once every four hours, though values for individuals may vary.

[0833] In some embodiments, the AAV particles may be delivered by systemic delivery. In some embodiments, the systemic delivery may be by intravascular administration. In some embodiments, the systemic delivery may be by intravenous (IV) administration.

[0834] In some embodiments, the AAV particles may be delivered by intravenous delivery.

[0835] In some embodiments, the AAV particle is administered to the subject via focused ultrasound (FUS), e.g., coupled with the intravenous administration of microbubbles (FUS-MB), or MRI-guided FUS coupled with intravenous administration, e.g., as described in Terstappen et al. (Nat Rev Drug Discovery, https://doi.org/10.1038/s41573-021-00139-y (2021)), Burgess et al. (Expert Rev Neurother. 15(5): 477-491 (2015)), and/or Hsu et al. (PLOS One 8(2): 1-8), the contents of which are incorporated herein by reference in its entirety.

[0836] In some embodiments, the AAV particles may be delivered by injection into the CSF pathway. Non-limiting examples of delivery to the CSF pathway include intrathecal and intracerebroventricular administration.

[0837] In some embodiments, the AAV particles may be delivered by thalamic delivery.

[0838] In some embodiments, the AAV particles may be delivered by intracerebral delivery.

[0839] In some embodiments, the AAV particles may be delivered by intracardiac delivery.

[0840] In some embodiments, the AAV particles may be delivered by intracranial delivery.

[0841] In some embodiments, the AAV particles may be delivered by intra cisterna magna (ICM) delivery.

[0842] In some embodiments, the AAV particles may be delivered by direct (intraparenchymal) injection into an organ (e.g., CNS (brain or spinal cord)). In some embodiments, the intraparenchymal delivery may be to any region of the brain or CNS.

[0843] In some embodiments, the AAV particles may be delivered by intrastriatal injection.

[0844] In some embodiments, the AAV particles may be delivered into the putamen.

[0845] In some embodiments, the AAV particles may be delivered into the spinal cord.

[0846] In some embodiments, the AAV particles of the present disclosure may be administered to the ventricles of the brain.

[0847] In some embodiments, the AAV particles of the present disclosure may be administered to the ventricles of the brain by intracerebroventricular delivery.

[0848] In some embodiments, the AAV particles of the present disclosure may be administered by intramuscular delivery.

[0849] In some embodiments, the AAV particles of the present disclosure are administered by more than one route described above. As a non-limiting example, the AAV particles may be administered by intravenous delivery and thalamic delivery.

[0850] In some embodiments, the AAV particles of the present disclosure are administered by more than one route described above. As a non-limiting example, the AAV particles may be administered by intravenous delivery and intracerebral delivery.

[0851] In some embodiments, the AAV particles of the present disclosure are administered by more than one route described above. As a non-limiting example, the AAV particles may be administered by intravenous delivery and intracranial delivery.

[0852] In some embodiments, the AAV particles of the present disclosure are administered by more than one route described above. In some embodiments, the AAV particles of the present disclosure may be delivered by intrathecal and intracerebroventricular administration.

[0853] In some embodiments, the AAV particles may be delivered to a subject to improve and/or correct mitochondrial dysfunction.

[0854] In some embodiments, the AAV particles may be delivered to a subject to preserve neurons. The neurons may be primary and/or secondary sensory neurons. In some embodiments, AAV particles are delivered to dorsal root ganglia and/or neurons thereof.

[0855] In some embodiments, administration of the AAV particles may preserve and/or correct function in the sensory pathways.

[0856] In some embodiments, the AAV particles may be delivered via intravenous (IV), intracerebroventricular (ICV), intraparenchymal, and/or intrathecal (IT) infusion and the therapeutic agent may also be delivered to a subject via intramuscular (IM) limb infusion in order to deliver the therapeutic agent to the skeletal muscle. Delivery of AAVs by intravascular limb infusion is described by Gruntman and Flotte, Human Gene Therapy Clinical Development, 2015, 26(3), 159-164, the contents of which are herein incorporated by reference in their entirety.

[0857] In some embodiments, delivery of viral vector pharmaceutical compositions in accordance with the present disclosure to cells of the central nervous system (e.g., parenchyma) comprises a rate of delivery defined by VG/hour=mL/hour*VG/mL, wherein VG is viral genomes, VG/mL is composition concentration, and mL/hour is rate of infusion.

[0858] In some embodiments, delivery of AAV particle pharmaceutical compositions in accordance with the present disclosure to cells of the central nervous system (e.g., parenchyma) comprises infusion of up to 1 mL. In some embodiments, delivery of viral vector pharmaceutical compositions in accordance with the present disclosure to cells of the central nervous system (e.g., parenchyma) may comprise infusion of 0.0001, 0.0002, 0.001, 0.002, 0.003, 0.004, 0.005, 0.008, 0.010, 0.015, 0.020, 0.025, 0.030, 0.040, 0.050, 0.060, 0.070, 0.080, 0.090, 0.1, 0.2, 0.3, 0.4, 0.5, 0.6, 0.7, 0.8, or 0.9 mL.

[0859] In some embodiments, delivery of AAV particle pharmaceutical compositions in accordance with the present disclosure to cells of the central nervous system (e.g., parenchyma) comprises infusion of between about 1 mL to about 120 mL. In some embodiments, delivery of viral vector pharmaceutical compositions in accordance with the present disclosure to cells of the central nervous system (e.g., parenchyma) may comprise an infusion of 0.1, 1, 1.1, 1.2, 1.3, 1.4, 1.5, 1.6, 1.7, 1.8, 1.9, 2, 3, 4, 5, 6, 7, 8, 9, 10, 11, 12, 13, 14, 15, 16, 17, 18, 19, 20, 21, 22, 23, 24, 25, 26, 27, 28, 29, 30, 31, 32, 33, 34, 35, 36, 37, 38, 39, 40, 41, 42, 43, 44, 45, 46, 47, 48, 49, 50, 51, 52, 53, 54, 55, 56, 57, 58, 59, 60, 61, 62, 63, 64, 65, 66, 67, 68, 69, 70, 71, 72, 73, 74, 75, 76, 77, 78, 79, 80, 81, 82, 83, 84, 85, 86, 87, 88, 89, 90, 91, 92, 93, 94, 95, 96, 97, 98, 99, 100, 101, 102, 103, 104, 105, 106, 107, 108, 109, 110, 111, 112, 113, 114, 115, 116, 117, 118, 119, or 120 mL. In some embodiments delivery of AAV particles to cells of the central nervous system (e.g., parenchyma) comprises infusion of at least 3 mL. In some embodiments, delivery of AAV particles to cells of the central nervous system (e.g., parenchyma) consists of infusion of 3 mL. In some embodiments, delivery of AAV particles to cells of the central nervous system (e.g., parenchyma) comprises infusion of at least 10 mL. In some embodiments, delivery of AAV particles to cells of the central nervous system (e.g., parenchyma) consists of infusion of 10 mL.

[0860] In some embodiments, the volume of the AAV particle pharmaceutical composition delivered to the cells of the central nervous system (e.g., parenchyma) of a subject is 2 μl, 20 μl, 50 μl, 80 μl, 100 μl, 200 μl, 300 μl, 400 μl, 500 μl, 600 μl, 700 μl, 800 μl, 900 μl, 1000 μl, 1100 μl, 1200 μl, 1300 μl, 1400 μl, 1500 μl, 1600 μl, 1700 μl, 1800 μl, 1900 μl, 2000 μl, or more than 2000 μl.

[0861] In some embodiments, the volume of the AAV particle pharmaceutical composition delivered to a region in both hemispheres of a subject brain is 2 μl, 20 μl, 50 μl, 80 μl, 100 μl, 200 μl, 300 μl, 400 μl, 500 μl, 600 μl, 700 μl, 800 μl, 900 μl, 1000 μl, 1100 μl, 1200 μl, 1300 μl, 1400 μl, 1500 μl, 1600 μl, 1700 μl, 1800 μl, 1900 μl, 2000 μl, or more than 2000 μl. In some embodiments, the volume delivered to a region in both hemispheres is 200 μl. As another non-limiting example, the volume delivered to a region in both hemispheres is 900 μl. As yet another non-limiting example, the volume delivered to a region in both hemispheres is 1800 μl.

[0862] In certain embodiments, AAV particle or viral vector pharmaceutical compositions in accordance with the present disclosure may be administered at about 10 to about 600 μl/site, about 50 to about 500 μl/site, about 100 to about 400 μl/site, about 120 to about 300 μl/site, about 140 to about 200 μl/site, or about 160 μl/site.

[0863] In some embodiments, the total volume delivered to a subject may be split between one or more administration sites e.g., 1, 2, 3, 4, 5, or more than 5 sites. In some embodiments, the total volume is split between administration to the left and right hemisphere.

### Delivery of AAV Particles

[0864] In some embodiments, the AAV particles or pharmaceutical compositions of the present disclosure may be administered or delivered using the methods for treatment of disease described in U.S. Pat. No. 8,999,948, or International Publication No. WO2014178863, the contents of which are herein incorporated by reference in their entirety.

[0865] In some embodiments, the AAV particles or pharmaceutical compositions of the present disclosure may be administered or delivered using the methods for delivering gene therapy in Alzheimer's Disease or other neurodegenerative conditions as described in US Application No. 20150126590, the contents of which are herein incorporated by reference in their entirety.

[0866] In some embodiments, the AAV particles or pharmaceutical compositions of the present disclosure may be administered or delivered using the methods for delivery of a CNS gene therapy as described in U.S. Pat. Nos. 6,436,708, and 8,946,152, and International Publication No. WO2015168666, the contents of which are herein incorporated by reference in their entirety.

[0867] In some embodiments, the AAV particles of the present disclosure may be administered or delivered using the methods for the delivery of AAV virions described in European Patent Application No. EP1857552, the contents of which are herein incorporated by reference in their entirety.

[0868] In some embodiments, the AAV particle or pharmaceutical compositions of the present disclosure may be administered or delivered using the methods for delivering proteins using AAV vectors described in European Patent Application No. EP2678433, the contents of which are herein incorporated by reference in their entirety.

[0869] In some embodiments, the viral vector encoding NPC protein may be administered or delivered using the methods for delivering DNA molecules using AAV vectors described in U.S. Pat. No. 5,858,351, the contents of which are herein incorporated by reference in their entirety.

[0870] In some embodiments, the AAV particle or pharmaceutical compositions of the present disclosure may be administered or delivered using the methods for delivering DNA to the bloodstream described in U.S. Pat. No. 6,211,163, the contents of which are herein incorporated by reference in their entirety.

[0871] In some embodiments, the viral vector encoding NPC protein may be administered or delivered using the methods for delivering AAV virions described in U.S. Pat. No. 6,325,998, the contents of which are herein incorporated by reference in their entirety.

[0872] In some embodiments, the viral vector encoding NPC protein may be administered or delivered using the methods for delivering DNA to muscle cells described in U.S. Pat. No. 6,335,011, the contents of which are herein incorporated by reference in their entirety.

[0873] In some embodiments, the viral vector encoding NPC protein may be administered or delivered using the methods for delivering DNA to muscle cells and tissues described in U.S. Pat. No. 6,610,290, the contents of which are herein incorporated by reference in their entirety.

[0874] In some embodiments, the viral vector encoding NPC protein may be administered or delivered using the methods for delivering DNA to muscle cells described in U.S. Pat. No. 7,704,492, the contents of which are herein incorporated by reference in their entirety.

[0875] In some embodiments, the viral vector encoding NPC protein may be administered or delivered using the methods for delivering a payload to skeletal muscles described in U.S. Pat. No. 7,112,321, the contents of which are herein incorporated by reference in their entirety.

[0876] In some embodiments, the AAV particle or pharmaceutical compositions of the present disclosure may be administered or delivered using the methods for delivering a payload to the central nervous system described in U.S. Pat. No. 7,588,757, the contents of which are herein incorporated by reference in their entirety.

[0877] In some embodiments, the AAV particle or pharmaceutical compositions of the present disclosure may be administered or delivered using the methods for delivering a payload described in U.S. Pat. No. 8,283,151, the contents of which are herein incorporated by reference in their entirety.

[0878] In some embodiments, the AAV particle or pharmaceutical compositions of the present disclosure may be administered or delivered using the methods for delivering a payload for the treatment of Alzheimer disease described in U.S. Pat. No. 8,318,687, the contents of which are herein incorporated by reference in their entirety.

[0879] In some embodiments, the AAV particle or pharmaceutical compositions of the present disclosure may be administered or delivered using the methods for delivering a payload described in International Patent Publication No. WO2012144446, the contents of which are herein incorporated by reference in their entirety.

[0880] In some embodiments, the AAV particle or pharmaceutical compositions of the present disclosure may be administered or delivered using the methods for delivering a payload using a glutamic acid decarboxylase (GAD) delivery vector described in International Patent Publication No. WO2001089583, the contents of which are herein incorporated by reference in their entirety.

[0881] In some embodiments, the AAV particle or pharmaceutical compositions of the present disclosure may be administered or delivered using the methods for delivering a payload to neural cells described in International Patent Publication No. WO2012057363, the contents of which are herein incorporated by reference in their entirety.

[0882] In some embodiments, the AAV particle or pharmaceutical compositions of the present disclosure may be administered or delivered using the methods for delivering a payload described in International Patent Publication No. WO2001096587, the contents of which are herein incorporated by reference in their entirety.

[0883] In some embodiments, the AAV particle or pharmaceutical compositions of the present disclosure may be administered or delivered using the methods for delivering a payload to muscle tissue described in International Patent Publication No. WO2002014487, the contents of which are herein incorporated by reference in their entirety.

[0884] In some embodiments, a catheter may be used to administer the AAV particles. In certain embodiments, the catheter or cannula may be located at more than one site in the spine for multi-site delivery. The viral particles encoding may be delivered in a continuous and/or bolus infusion. Each site of delivery may be a different dosing regimen or the same dosing regimen may be used for each site of delivery. In some embodiments, the sites of delivery may be in the cervical and the lumbar region. In some embodiments, the sites of delivery may be in the cervical region. In some embodiments, the sites of delivery may be in the lumbar region.

[0885] In some embodiments, a subject may be analyzed for spinal anatomy and pathology prior to delivery of the AAV particles described herein. As a non-limiting example, a subject with scoliosis may have a different dosing regimen and/or catheter location compared to a subject without scoliosis.

[0886] In some embodiments, the delivery method and duration is chosen to provide broad transduction in the spinal cord. In some embodiments, intrathecal delivery is used to provide broad transduction along the rostral-caudal length of the spinal cord. In some embodiments, multi-site infusions provide a more uniform transduction along the rostral-caudal length of the spinal cord.

[0887] In some embodiments, the AAV particle or pharmaceutical compositions of the present disclosure may be administered or delivered to an individual in need thereof through intravenous injection of AAV9 viral particles encoding NPC1 or a functional equivalent thereof.

[0888] In some embodiments, the AAV particle or pharmaceutical compositions of the present disclosure may be administered or delivered to an individual (such as a neonatal patient or juvenile patient) in need thereof through intraparenchymal (IPa) delivery of AAV9 viral particles encoding NPC1 or a functional equivalent thereof.

[0889] In some embodiments, intraparenchymal delivery, also referred to as intracranial delivery, comprises injection of an AAV particle, e.g., an AAV particle comprising a viral genome described herein, into the brain parenchyma. Without wishing to be bound by theory, it is believed in some embodiments, that intraparenchymal delivery results in targeting of specific brain regions, such as the targeted cortex, cerebellum, corpus callosum, brain stem, or combination thereof.

### Delivery to Cells

[0890] In some aspects, the present disclosure provides a method of delivering to a cell or tissue any of the above-described AAV particles, comprising contacting the cell or tissue with said AAV particle or contacting the cell or tissue with a formulation comprising said AAV particle, or contacting the cell or tissue with any of the described compositions, including pharmaceutical compositions. The method of delivering the AAV particle to a cell or tissue can be accomplished in vitro, ex vivo, or in vivo.

### Delivery to Subjects

[0891] In some aspects, the present disclosure additionally provides a method of delivering to a subject, including a mammalian subject, any of the above-described AAV particles comprising administering to the subject said AAV particle, or administering to the subject a formulation comprising said AAV particle, or administering to the subject any of the described compositions, including pharmaceutical compositions.

[0892] In some embodiments, the AAV particles may be delivered to bypass anatomical blockages such as, but not limited to the blood brain barrier.

[0893] In some embodiments, the AAV particles may be formulated and delivered to a subject by a route which increases the speed of drug effect as compared to oral delivery.

[0894] In some embodiments, the AAV particles may be delivered by a method to provide uniform transduction of the spinal cord and dorsal root ganglion (DRG). In some embodiments, the AAV particles may be delivered using intrathecal infusion.

[0895] In some embodiments, a subject may be administered the AAV particles described herein using a bolus infusion. As used herein, a “bolus infusion” means a single and rapid infusion of a substance or composition.

[0896] In some embodiments, the AAV particles encoding NPC protein may be delivered in a continuous and/or bolus infusion. Each site of delivery may be a different dosing regimen or the same dosing regimen may be used for each site of delivery. As a non-limiting example, the sites of delivery may be in the cervical and the lumbar region. As another non-limiting example, the sites of delivery may be in the cervical region. As another non-limiting example, the sites of delivery may be in the lumbar region.

[0897] In some embodiments, the AAV particles may be delivered to a subject via a single route administration.

[0898] In some embodiments, the AAV particles may be delivered to a subject via a multi-site route of administration. For example, a subject may be administered the AAV particles at 2, 3, 4, 5, or more than 5 sites.

[0899] In some embodiments, a subject may be administered the AAV particles described herein using sustained delivery over a period of minutes, hours or days. The infusion rate may be changed depending on the subject, distribution, formulation or another delivery parameter known to those in the art.

[0900] In some embodiments, if continuous delivery (continuous infusion) of the AAV particles is used, the continuous infusion may be for 1 hour, 2, hours, 3 hours, 4 hours, 5 hours, 6 hours, 7 hours, 8 hours, 9 hours, 10 hours, 11 hours, 12 hours, 13 hours, 14 hours, 15 hours, 16 hours, 17 hours, 18 hours, 19 hours, 20 hours, 21 hours, 22 hours, 23 hours, 24 hours, or more than 24 hours.

[0901] In some embodiments, the intracranial pressure may be evaluated prior to administration. The route, volume, AAV particle concentration, infusion duration and/or vector titer may be optimized based on the intracranial pressure of a subject.

[0902] In some embodiments, the AAV particles may be delivered by systemic delivery. In some embodiments, the systemic delivery may be by intravascular administration.

[0903] In some embodiments, the AAV particles may be delivered by injection into the CSF pathway. Non-limiting examples of delivery to the CSF pathway include intrathecal and intracerebroventricular administration.

[0904] In some embodiments, the AAV particles may be delivered by direct (intraparenchymal) injection into the substance of an organ, e.g., one or more regions of the brain.

[0905] In some embodiments, the AAV particles may be delivered by subpial injection into the spinal cord. For example, subjects may be placed into a spinal immobilization apparatus. A dorsal laminectomy may be performed to expose the spinal cord. Guiding tubes and XYZ manipulators may be used to assist catheter placement. Subpial catheters may be placed into the subpial space by advancing the catheter from the guiding tube and AAV particles may be injected through the catheter (Miyanohara et al., Mol Ther Methods Clin Dev. 2016; 3: 16046). In some cases, the AAV particles may be injected into the cervical subpial space. In some cases, the AAV particles may be injected into the thoracic subpial space.

[0906] In some embodiments, the AAV particles may be delivered to a subject in order to increase the NPC protein protein levels in the caudate-putamen, thalamus, superior colliculus, cortex, and/or corpus callosum as compared to endogenous levels. The increase may be 0.1× to 5×, 0.5× to 5×, 1× to 5×, 2× to 5×, 3× to 5×, 4× to 5×, 0.1× to 4×, 0.5× to 4×, 1× to 4×, 2× to 4×, 3× to 4×, 0.1× to 3×, 0.5× to 3×, 1× to 3×, 2× to 3×, 0.1× to 2×, 0.5× to 2×, 0.1× to 1×, 0.5× to 1×, 0.1× to 0.5×, 1× to 2×, 0.1×, 0.2×, 0.3×, 0.4×, 0.5×, 0.6×, 0.7×, 0.8×, 0.9×, 1.0×, 1.1×, 1.2×, 1.3×, 1.4×, 1.5×, 1.6×, 1.7×, 1.8×, 1.9×, 2.0×, 2.1×, 2.2×, 2.3×, 2.4×, 2.5×, 2.6×, 2.7×, 2.8×, 2.9×, 3.0×, 3.1×, 3.2×, 3.3×, 3.4×, 3.5×, 3.6×, 3.7×, 3.8×, 3.9×, 4.0×, 4.1×, 4.2×, 4.3×, 4.4×, 4.5×, 4.6×, 4.7×, 4.8×, 4.9× or more than 5× as compared to endogenous levels.

[0907] In some embodiments, the AAV particles may be delivered to a subject in order to increase the NPC protein protein levels in the caudate-putamen, thalamus, superior colliculus, cortex, and/or corpus callosum by transducing cells in these CNS regions. Transduction may also be referred to as the amount of cells that are positive for NPC protein. The transduction may be greater than or equal to 1%, 5%, 10%, 15%, 20%, 25%, 30%, 35%, 40%, 45%, 50%, 55%, 60%, 65%, 70%, 75%, 80%, 85%, 90%, 95%, or 99% of cells in these CNS regions.

[0908] In some embodiments, delivery of AAV particles comprising a viral genome encoding NPC protein described herein to neurons in the caudate-putamen, thalamus, superior colliculus, cortex, and/or corpus callosum will lead to an increased expression of NPC protein. The increased expression may lead to improved survival and function of various cell types in these CNS regions and subsequent improvement of NPC1 symptoms.

[0909] Specifically, in some embodiments, the increased expression of NPC protein may lead to improved gait, sensory capability, coordination of movement and strength, functional capacity, cognition, and/or quality of life.

### Dosing

[0910] In some aspects, the present disclosure provides methods comprising administering viral vectors and their payloads in accordance with the disclosure to a subject in need thereof. Viral vector pharmaceutical, imaging, diagnostic, or prophylactic compositions thereof, may be administered to a subject using any amount and any route of administration effective for preventing, treating, diagnosing, or imaging a disease, disorder, and/or condition (e.g., a disease, disorder, and/or condition associated with decreased NPC protein expression or a deficiency in the quantity and/or function of NPC protein). In some embodiments, the disease, disorder, and/or condition is NPC1. The exact amount required will vary from subject to subject, depending on the species, age, and general condition of the subject, the severity of the disease, the particular composition, its mode of administration, its mode of activity, and the like. Compositions in accordance with the disclosure are typically formulated in unit dosage form for ease of administration and uniformity of dosage. It will be understood, however, that the total daily usage of the compositions of the present disclosure may be decided by the attending physician within the scope of sound medical judgment. The specific therapeutically effective, prophylactically effective, or appropriate imaging dose level for any particular patient will depend upon a variety of factors including the disorder being treated and the severity of the disorder; the activity of the specific compound employed; the specific composition employed; the age, body weight, general health, sex, and diet of the patient; the time of administration, route of administration, and rate of excretion of the specific peptide(s) employed; the duration of the treatment; drugs used in combination or coincidental with the specific compound employed; and like factors well known in the medical arts.

[0911] In certain embodiments, AAV particle pharmaceutical compositions in accordance with the present disclosure may be administered at dosage levels sufficient to deliver NPC protein from about 0.0001 mg/kg to about 100 mg/kg, from about 0.001 mg/kg to about 0.05 mg/kg, from about 0.005 mg/kg to about 0.05 mg/kg, from about 0.001 mg/kg to about 0.005 mg/kg, from about 0.05 mg/kg to about 0.5 mg/kg, from about 0.01 mg/kg to about 50 mg/kg, from about 0.1 mg/kg to about 40 mg/kg, from about 0.5 mg/kg to about 30 mg/kg, from about 0.01 mg/kg to about 10 mg/kg, from about 0.1 mg/kg to about 10 mg/kg, or from about 1 mg/kg to about 25 mg/kg, of subject body weight per day, one or more times a day, to obtain the desired therapeutic, diagnostic, prophylactic, or imaging effect. It will be understood that the above dosing concentrations may be converted to VG or viral genomes per kg or into total viral genomes administered by one of skill in the art.

[0912] In certain embodiments, the desired dosage may be delivered using multiple administrations (e.g., two, three, four, five, six, seven, eight, nine, ten, eleven, twelve, thirteen, fourteen, or more administrations). When multiple administrations are employed, split dosing regimens such as those described herein may be used. As used herein, a “split dose” is the division of single unit dose or total daily dose into two or more doses, e.g., two or more administrations of the single unit dose. As used herein, a “single unit dose” is a dose of any therapeutic composition administered in one dose/at one time/single route/single point of contact, i.e., single administration event. In some embodiments, a single unit dose is provided as a discrete dosage form (e.g., a tablet, capsule, patch, loaded syringe, vial, etc.). As used herein, a “total daily dose” is an amount given or prescribed in 24-hour period. It may be administered as a single unit dose. The viral particles may be formulated in buffer only or in a formulation described herein.

[0913] A pharmaceutical composition described herein can be formulated into a dosage form described herein, such as a topical, intranasal, pulmonary, intratracheal, or injectable (e.g., intravenous, intraocular, intravitreal, intramuscular, intracardiac, intraperitoneal, and/or subcutaneous).

[0914] In some embodiments, delivery of the AAV particles described herein results in minimal serious adverse events (SAEs) as a result of the delivery of the AAV particles.

[0915] In some embodiments, delivery of AAV particle pharmaceutical compositions in accordance with the present disclosure to cells of the central nervous system (e.g., parenchyma) may comprise a total concentration between about 1×10⁶ VG/mL and about 1×10¹⁶ VG/mL. In some embodiments, delivery may comprise a composition concentration of about 1×10⁶, 2×10⁶, 3×10⁶, 4×10⁶, 5×10⁶, 6×10⁶, 7×10⁶, 8×10⁶, 9×10⁶, 1×10⁷, 2×10⁷, 3×10⁷, 4×10⁷, 5×10⁷, 6×10⁷, 7×10⁷, 8×10⁷, 9×10⁷, 1×10⁸, 2×10⁸, 3×10⁸, 4×10⁸, 5×10⁸, 6×10⁸, 7×10⁸, 8×10⁸, 9×10⁸, 1×10⁹, 2×10⁹, 3×10⁹, 4×10⁹, 5×10⁹, 6×10⁹, 7×10⁹, 8×10⁹, 9×10⁹, 1×10¹⁰, 2×10¹⁰, 3×10¹⁰, 4×10¹⁰, 5×10¹⁰, 6×10¹⁰, 7×10¹⁰, 8×10¹⁰, 9×10¹⁰, 1×10¹¹, 1.6×10¹¹, 1.8×10¹¹, 2×10¹¹, 3×10¹¹, 4×10¹¹, 5×10¹¹, 5.5×10¹¹, 6×10¹¹, 7×10¹¹, 8×10¹¹, 9×10¹¹, 0.8×10¹², 0.83×10¹², 1×10¹², 1.1×10¹², 1.2×10¹², 1.3×10¹², 1.4×10¹², 1.5×10¹², 1.6×10¹², 1.7×10¹², 1.8×10¹², 1.9×10¹², 2×10¹², 2.1×10¹², 2.2×10¹², 2.3×10¹², 2.4×10¹², 2.5×10¹², 2.6×10¹², 2.7×10¹², 2.8×10¹², 2.9×10¹², 3×10¹², 3.1×10¹², 3.2×10¹², 3.3×10¹², 3.4×10¹², 3.5×10¹², 3.6×10¹², 3.7×10¹², 3.8×10¹², 3.9×10¹², 4×10¹², 4.1×10¹², 4.2×10¹², 4.3×10¹², 4.4×10¹², 4.5×10¹², 4.6×10¹², 4.7×10¹², 4.8×10¹², 4.9×10¹², 5×10¹², 6×10¹², 7×10¹², 8×10¹², 9×10¹², 1×10¹³, 2×10¹³, 2.3×10¹³, 3×10¹³, 4×10¹³, 5×10¹³, 6×10¹³, 7×10¹³, 8×10¹³, 9×10¹³, 1×10¹⁴, 1.9×10¹⁴, 2×10¹⁴, 3×10¹⁴, 4×10¹⁴, 5×10¹⁴, 6×10¹⁴, 7×10¹⁴, 8×10¹⁴, 9×10¹⁴, 1×10¹⁵, 2×10¹⁵, 3×10¹⁵, 4×10¹⁵, 5×10¹⁵, 6×10¹⁵, 7×10¹⁵, 8×10¹⁵, 9×10¹⁵, or 1×10¹⁶ VG/mL. In some embodiments, the concentration of the viral vector in the composition is 1×10¹³ VG/mL. In some embodiments, the concentration of the viral vector in the composition is 1.1×10¹² VG/mL. In some embodiments, the concentration of the viral vector in the composition is 3.7×10¹² VG/mL. In some embodiments, the concentration of the viral vector in the composition is 8×10¹¹ VG/mL. In some embodiments, the concentration of the viral vector in the composition is 2.6×10¹² VG/mL. In some embodiments, the concentration of the viral vector in the composition is 4.9×10¹² VG/mL. In some embodiments, the concentration of the viral vector in the composition is 0.8×10¹² VG/mL. In some embodiments, the concentration of the viral vector in the composition is 0.83×10¹² VG/mL. In some embodiments, the concentration of the viral vector in the composition is the maximum final dose which can be contained in a vial. In some embodiments, the concentration of the viral vector in the composition is 1.6×10¹¹ VG/mL. In some embodiments, the concentration of the viral vector in the composition is 5×10¹¹ VG/mL. In some embodiments, the concentration of the viral vector in the composition is 2.3×10¹³ VG/mL. In some embodiments, the concentration of the viral vector in the composition is 1.9×10¹⁴ VG/mL.

[0916] In some embodiments, delivery of AAV particle pharmaceutical compositions in accordance with the present disclosure to cells of the central nervous system (e.g., parenchyma) may comprise a total concentration per subject between about 1×10⁶ VG and about 1×10¹⁶ VG. In some embodiments, delivery may comprise a composition concentration of about 1×10⁶, 2×10⁶, 3×10⁶, 4×10⁶, 5×10⁶, 6×10⁶, 7×10⁶, 8×10⁶, 9×10⁶, 1×10⁷, 2×10⁷, 3×10⁷, 4×10⁷, 5×10⁷, 6×10⁷, 7×10⁷, 8×10⁷, 9×10⁷, 1×10⁸, 2×10⁸, 3×10⁸, 4×10⁸, 5×10⁸, 6×10⁸, 7×10⁸, 8×10⁸, 9×10⁸, 1×10⁹, 2×10⁹, 3×10⁹, 4×10⁹, 5×10⁹, 6×10⁹, 7×10⁹, 8×10⁹, 9×10⁹, 1×10¹⁰, 2×10¹⁰, 3×10¹⁰, 4×10¹⁰, 5×10¹⁰, 6×10¹⁰, 7×10¹⁰, 8×10¹⁰, 9×10¹⁰, 1×10¹¹, 1.6×10¹¹, 2×10¹¹, 2.1×10¹¹, 2.2×10¹¹, 2.3×10¹¹, 2.4×10¹¹, 2.5×10¹¹, 2.6×10¹¹, 2.7×10¹¹, 2.8×10¹¹, 2.9×10¹¹, 3×10¹¹, 4×10¹¹, 4.6×10¹¹, 5×10¹¹, 6×10¹¹, 7×10¹¹, 7.1×10¹¹, 7.2×10¹¹, 7.3×10¹¹, 7.4×10¹¹, 7.5×10¹¹, 7.6×10¹¹, 7.7×10¹¹, 7.8×10¹¹, 7.9×10¹¹, 8×10¹¹, 9×10¹¹, 1×10¹², 1.1×10¹², 1.2×10¹², 1.3×10¹², 1.4×10¹², 1.5×10¹², 1.6×10¹², 1.7×10¹², 1.8×10¹², 1.9×10¹², 2×10¹², 2.3×10¹², 3×10¹², 4×10¹², 4.1×10¹², 4.2×10¹², 4.3×10¹², 4.4×10¹², 4.5×10¹², 4.6×10¹², 4.7×10¹², 4.8×10¹², 4.9×10¹², 5×10¹², 6×10¹², 7×10¹², 8×10¹², 8.1×10¹², 8.2×10¹², 8.3×10¹², 8.4×10¹², 8.5×10¹², 8.6×10¹², 8.7×10¹², 8.8×10¹², 8.9×10¹², 9×10¹², 1×10¹³, 2×10¹³, 3×10¹³, 4×10¹³, 5×10¹³, 6×10¹³, 7×10¹³, 8×10¹³, 9×10¹³, 1×10¹⁴, 2×10¹⁴, 3×10¹⁴, 4×10¹⁴, 5×10¹⁴, 6×10¹⁴, 7×10¹⁴, 8×10¹⁴, 9×10¹⁴, 1×10¹⁵, 2×10¹⁵, 3×10¹⁵, 4×10¹⁵, 5×10¹⁵, 6×10¹⁵, 7×10¹⁵, 8×10¹⁵, 9×10¹⁵, or 1×10¹⁶ VG/subject. In some embodiments, the concentration of the viral vector in the composition is 2.3×10¹¹ VG/subject. In some embodiments, the concentration of the viral vector in the composition is 7.2×10¹¹ VG/subject. In some embodiments, the concentration of the viral vector in the composition is 7.5×10¹¹ VG/subject. In some embodiments, the concentration of the viral vector in the composition is 1.4×10¹² VG/subject. In some embodiments, the concentration of the viral vector in the composition is 4.8×10¹² VG/subject. In some embodiments, the concentration of the viral vector in the composition is 8.8×10¹² VG/subject. In some embodiments, the concentration of the viral vector in the composition is 2.3×10¹² VG/subject. In some embodiments, the concentration of the viral vector in the composition is 2×10¹⁰ VG/subject. In some embodiments, the concentration of the viral vector in the composition is 1.6×10¹¹ VG/subject. In some embodiments, the concentration of the viral vector in the composition is 4.6×10¹¹ VG/subject.

[0917] In some embodiments, delivery of AAV particles to cells of the central nervous system (e.g., parenchyma) may comprise a total dose between about 1×10⁶ VG and about 1×10¹⁶ VG. In some embodiments, delivery may comprise a total dose of about 1×10⁶, 2×10⁶, 3×10⁶, 4×10⁶, 5×10⁶, 6×10⁶, 7×10⁶, 8×10⁶, 9×10⁶, 1×10⁷, 2×10⁷, 3×10⁷, 4×10⁷, 5×10⁷, 6×10⁷, 7×10⁷, 8×10⁷, 9×10⁷, 1×10⁸, 2×10⁸, 3×10⁸, 4×10⁸, 5×10⁸, 6×10⁸, 7×10⁸, 8×10⁸, 9×10⁸, 1×10⁹, 2×10⁹, 3×10⁹, 4×10⁹, 5×10⁹, 6×10⁹, 7×10⁹, 8×10⁹, 9×10⁹, 1×10¹⁰, 1.9×10¹⁰, 2×10¹⁰, 3×10¹⁰, 3.73×10¹⁰, 4×10¹⁰, 5×10¹⁰, 6×10¹⁰, 7×10¹⁰, 8×10¹⁰, 9×10¹⁰, 1×10¹¹, 2×10¹¹, 2.5×10¹¹, 3×10¹¹, 4×10¹¹, 5×10¹¹, 6×10¹¹, 7×10¹¹, 8×10¹¹, 9×10¹¹, 1×10¹², 2×10¹², 3×10¹², 4×10¹², 5×10¹², 6×10¹², 7×10¹², 8×10¹², 9×10¹², 1×10¹³, 2×10¹³, 3×10¹³, 4×10¹³, 5×10¹³, 6×10¹³, 7×10¹³, 8×10¹³, 9×10¹³, 1×10¹⁴, 2×10¹⁴, 3×10¹⁴, 4×10¹⁴, 5×10¹⁴, 6×10¹⁴, 7×10¹⁴, 8×10¹⁴, 9×10¹⁴, 1×10¹⁵, 2×10¹⁵, 3×10¹⁵, 4×10¹⁵, 5×10¹⁵, 6×10¹⁵, 7×10¹⁵, 8×10¹⁵, 9×10¹⁵, or 1×10¹⁶ VG. In some embodiments, the total dose is 1×10¹³ VG. In some embodiments, the total dose is 3×10¹³ VG. In some embodiments, the total dose is 3.73×10¹⁰ VG. In some embodiments, the total dose is 1.9×10¹⁰ VG. In some embodiments, the total dose is 2.5×10¹¹ VG. In some embodiments, the total dose is 5×10¹¹ VG. In some embodiments, the total dose is 1×10¹² VG. In some embodiments, the total dose is 5×10¹² VG.

### Combinations

[0918] The AAV particles may be used in combination with one or more other therapeutic, prophylactic, diagnostic, or imaging agents. The phrase “in combination with,” is not intended to require that the agents must be administered at the same time and/or formulated for delivery together, although these methods of delivery are within the scope of the present disclosure. Compositions can be administered concurrently with, prior to, or subsequent to, one or more other desired therapeutics or medical procedures. In general, each agent will be administered at a dose and/or on a time schedule determined for that agent. In some embodiments, the present disclosure encompasses the delivery of pharmaceutical, prophylactic, diagnostic, or imaging compositions in combination with agents that may improve their bioavailability, reduce and/or modify their metabolism, and/or modify their distribution within the body.

[0919] In some embodiments, the AAV particles of the present disclosure are administered to subjects on miglustat treatment for NPC1. The AAV particles and methods described herein can be used before, during, or after miglustat treatment. The AAV particles and methods can be administered alongside miglustat treatment. In some embodiments, the combined treatments of miglustat and AAV particle administration as described herein will provide additive or synergistic benefit in the amelioration of NPC1 disease symptoms.

[0920] In some embodiments, the AAV particles, compositions, and methods of the present disclosure can be administered to subjects in combination with other NPC1 treatments. NPC1 treatments which can be combined with the AAV particles, compositions, and methods of the present disclosure include cyclodextrin-based treatments for NPC1. Cyclodextrin-based treatments for NPC1 include, for example, those described in Yu, Daozhan, et al. “Niemann-Pick disease type C: induced pluripotent stem cell-derived neuronal cells for modeling neural disease and evaluating drug efficacy.” Journal of biomolecular screening 19.8 (2014): 1164-1173, the disclosure of which is incorporated by reference in its entirety. Other cyclodextrin-based NPC1 treatments include: TRAPPSOL CYCLO (CTD Holdings) (see ClinicalTrials.gov Identifiers NCT02939547, NCT02912793 and NCT03893071) and VTS-270 (Mallinckrodt Pharmaceuticals) (a 2-hydroxypropyl-β-cyclodextrin (HPβCD) mixture) (see ClinicalTrials.gov Identifier NCT03887533). Other treatments for NPC1 that can be combined with the compositions and methods of the present disclosure include administration of arimoclomol, e.g., arimoclomol citrate (Orphazyme A/S) (see ClinicalTrials.gov Identifier NCT02612129). The AAV particles and methods described herein can be administered before, during, or after other treatment for NPC1. The AAV particles and methods can be administered alongside other treatment for NPC1. In some embodiments, the combined treatments as described herein will provide additive or synergistic benefit in the amelioration of NPC1 disease symptoms.

### Measurement of Expression

[0921] Expression of NPC protein from viral genomes may be determined using various methods known in the art such as, but not limited to immunochemistry (e.g., IHC), enzyme-linked immunosorbent assay (ELISA), affinity ELISA, ELISPOT, flow cytometry, immunocytology, surface plasmon resonance analysis, kinetic exclusion assay, liquid chromatography-mass spectrometry (LCMS), high-performance liquid chromatography (HPLC), BCA assay, immunoelectrophoresis, Western blot, SDS-PAGE, protein immunoprecipitation, PCR, and/or in situ hybridization (ISH). In some embodiments, transgenes encoding NPC protein delivered in different AAV capsids may have different expression levels in different CNS tissues.

[0922] In certain embodiments, the NPC protein is detectable by Western blot.

### VII. Kits and Devices

### Kits

[0923] In some aspects, the present disclosure provides a variety of kits for conveniently and/or effectively carrying out methods of the present disclosure. Typically, kits will comprise sufficient amounts and/or numbers of components to allow a user to perform multiple treatments of a subject(s) and/or to perform multiple experiments.

[0924] Any of the vectors, constructs, or NPC protein of the present disclosure may be comprised in a kit. In some embodiments, kits may further include reagents and/or instructions for creating and/or synthesizing compounds and/or compositions of the present disclosure. In some embodiments, kits may also include one or more buffers. In some embodiments, kits of the disclosure may include components for making protein or nucleic acid arrays or libraries and thus, may include, for example, solid supports.

[0925] In some embodiments, kit components may be packaged either in aqueous media or in lyophilized form. The container means of the kits will generally include at least one vial, test tube, flask, bottle, syringe or other container means, into which a component may be placed, and suitably aliquoted. Where there is more than one kit component, (labeling reagent and label may be packaged together), kits may also generally contain second, third or other additional containers into which additional components may be separately placed. In some embodiments, kits may also comprise second container means for containing sterile, pharmaceutically acceptable buffers and/or other diluents. In some embodiments, various combinations of components may be comprised in one or more vial. Kits of the present disclosure may also typically include means for containing compounds and/or compositions of the present disclosure, e.g., proteins, nucleic acids, and any other reagent containers in close confinement for commercial sale. Such containers may include injection or blow-molded plastic containers into which desired vials are retained.

[0926] In some embodiments, kit components are provided in one and/or more liquid solutions. In some embodiments, liquid solutions are aqueous solutions, with sterile aqueous solutions being particularly used. In some embodiments, kit components may be provided as dried powder(s). When reagents and/or components are provided as dry powders, such powders may be reconstituted by the addition of suitable volumes of solvent. In some embodiments, it is envisioned that solvents may also be provided in another container means. In some embodiments, labeling dyes are provided as dried powders. In some embodiments, it is contemplated that 10, 20, 30, 40, 50, 60, 70, 80, 90, 100, 120, 120, 130, 140, 150, 160, 170, 180, 190, 200, 300, 400, 500, 600, 700, 800, 900, 1000 micrograms or at least or at most those amounts of dried dye are provided in kits of the disclosure. In such embodiments, dye may then be resuspended in any suitable solvent, such as DMSO.

[0927] In some embodiments, kits may include instructions for employing kit components as well the use of any other reagent not included in the kit. Instructions may include variations that may be implemented.

### Devices

[0928] In some embodiments, compounds and/or compositions of the present disclosure may be combined with, coated onto or embedded in a device. Devices may include, but are not limited to, dental implants, stents, bone replacements, artificial joints, valves, pacemakers and/or other implantable therapeutic device.

[0929] The present disclosure provides for devices which may incorporate viral vectors that encode one or more NPC protein molecules. These devices contain in a stable formulation the viral vectors which may be immediately delivered to a subject in need thereof, such as a human patient.

[0930] Devices for administration may be employed to deliver the viral vectors encoding NPC protein of the present disclosure according to single, multi- or split-dosing regimens taught herein.

[0931] Method and devices known in the art for multi-administration to cells, organs and tissues are contemplated for use in conjunction with the methods and compositions disclosed herein as embodiments of the present disclosure.

### VIII. Definitions

[0932] At various places in the present specification, substituents of compounds of the present disclosure are disclosed in groups or in ranges. It is specifically intended that the present disclosure include each and every individual sub-combination of the members of such groups and ranges. The following is a non-limiting list of term definitions.

[0933] Adeno-associated virus: As used herein, the term “adeno-associated virus” or “AAV” refers to members of the dependovirus genus or a variant, e.g., a functional variant, thereof. In some embodiments, the AAV is wildtype, or naturally occurring. In some embodiments, the AAV is recombinant.

[0934] AAV Particle: As used herein, an “AAV particle” refers to a particle or a virion comprising an AAV capsid, e.g., an AAV capsid variant, and a polynucleotide, e.g., a viral genome or a vector genome. In some embodiments, the viral genome of the AAV particle comprises at least one payload region and at least one ITR. In some embodiments, an AAV particle of the disclosure is an AAV particle comprising an AAV capsid polypeptide, e.g., a parent capsid sequence with at least one peptide, e.g., targeting peptide, insert. In some embodiments, the AAV particle is capable of delivering a nucleic acid, e.g., a payload region, encoding a payload to cells, typically, mammalian, e.g., human, cells. In some embodiments, an AAV particle of the present disclosure may be produced recombinantly. In some embodiments, an AAV particle may be derived from any serotype, described herein or known in the art, including combinations of serotypes (e.g., “pseudotyped” AAV) or from various genomes (e.g., single stranded or self-complementary). In some embodiments, the AAV particle may be replication defective and/or targeted. In some embodiments, the AAV particle may comprises a peptide, e.g., targeting peptide, present, e.g., inserted into, the capsid to enhance tropism for a desired target tissue. It is to be understood that reference to the AAV particle of the disclosure also includes pharmaceutical compositions thereof, even if not explicitly recited.

[0935] Active Ingredient: As used herein, the term “active ingredient” refers to a molecule or complex thereof that is biologically active and responsible for a generating a biological effect. The active ingredient in a pharmaceutical composition may be referred to as an active pharmaceutical ingredient. For the purposes of the present disclosure, the phrase “active ingredient” generally refers either to the viral particle carrying the payload or to the payload (or its gene product) delivered by the viral particle as described herein. In contrast, an “inactive ingredient” refers to a substance which is biologically inert. An excipient is an example of an inactive ingredient.

[0936] Activity: As used herein, the term “activity” refers to the condition in which things are happening or being done. Compositions of the disclosure may have activity and this activity may involve one or more biological events.

[0937] Administered in combination: As used herein, the term “administered in combination” or “delivered in combination” or “combined administration” refers to exposure of two or more agents (e.g., AAV) administered at the same time or within an interval such that the subject is at some point in time exposed to both agents and/or such that there is an overlap in the effect of each agent on the patient. In some embodiments, at least one dose of one or more agents is administered within about 24 hours, 12 hours, 6 hours, 3 hours, 1 hour, 30 minutes, 15 minutes, 10 minutes, 5 minutes, or 1 minute of at least one dose of one or more other agents. In some embodiments, administration occurs in overlapping dosage regimens. As used herein, the term “dosage regimen” refers to a plurality of doses spaced apart in time. Such doses may occur at regular intervals or may include one or more hiatuses in administration. In some embodiments, the administration of individual doses of one or more compounds and/or compositions of the present disclosure, as described herein, are spaced sufficiently closely together such that a combinatorial (e.g., a synergistic) effect is achieved.

[0938] Amelioration: As used herein, the term “amelioration” or “ameliorating” refers to a lessening of severity of at least one indicator of a condition or disease. For example, in the context of a neurodegenerative disorder, amelioration includes the reduction or stabilization of neuron loss.

[0939] Animal: As used herein, the term “animal” refers to any member of the animal kingdom. In some embodiments, the terms subject or animal refers to humans at any stage of development. In some embodiments, animal refers to non-human animals at any stage of development. In certain embodiments, the non-human animal is a mammal (e.g., a rodent, a mouse, a rat, a rabbit, a monkey, a dog, a cat, a sheep, cattle, a primate, or a pig). In some embodiments, animals include, but are not limited to, mammals, birds, reptiles, amphibians, fish, and worms. In some embodiments, the animal is a transgenic animal, genetically-engineered animal, or a clone.

[0940] Approximately: As used herein, the term “approximately” or “about,” as applied to one or more values of interest, refers to a value that is similar to a stated reference value. In certain embodiments, the term “approximately” or “about” refers to a range of values that fall within 25%, 20%, 19%, 18%, 17%, 16%, 15%, 14%, 13%, 12%, 11%, 10%, 9%, 8%, 7%, 6%, 5%, 4%, 3%, 2%, 1%, 0.5%, 0.25%, 0.1%, or less in either direction (greater than or less than) of the stated reference value unless otherwise stated or otherwise evident from the context (except where such number would exceed 100% of a possible value).

[0941] Biologically active: As used herein, the phrase “biologically active” refers to a characteristic of any substance (e.g., an AAV) that has activity in or on a biological system and/or organism. For instance, a substance that, when administered to an organism, has a biological effect on that organism, is considered to be biologically active. In particular embodiments, a compound, and/or a composition of the present disclosure may be considered biologically active if even a portion of it is biologically active or mimics an activity considered to be biologically relevant. In some embodiments, biological activity refers to inducing expression of NPC protein or a variant thereof. In some embodiments, biological activity refers to preventing and/or treating a disease associated with decreased NPC protein expression or a deficiency in the quantity and/or function of NPC protein. In some embodiments, biological activity refers to preventing and/or treating NPC1.

[0942] Biological system: As used herein, the term “biological system” refers to a group of organs, tissues, cells, intracellular components, proteins, nucleic acids, molecules (including, but not limited to biomolecules) that function together to perform a certain biological task within cellular membranes, cellular compartments, cells, tissues, organs, organ systems, multicellular organisms, or any biological entity. In some embodiments, biological systems are cell signaling pathways comprising intracellular and/or extracellular cell signaling biomolecules. In some embodiments, biological systems comprise growth factor signaling events within the extracellular/cellular matrix and/or cellular niches.

[0943] Capsid: As used herein, the term “capsid” refers to the exterior, e.g., a protein shell, of a virus particle, e.g., an AAV particle, that is substantially (e.g., >50%, >60%, >70%, >80%, >90%, >95%, >99%, or 100%) protein. In some embodiments, the capsid is an AAV capsid comprising an AAV capsid protein described herein, e.g., a VP1, VP2, and/or VP3 polypeptide. The AAV capsid protein can be a wild-type AAV capsid protein or a variant, e.g., a structural and/or functional variant from a wild-type or a reference capsid protein, referred to herein as an “AAV capsid variant.” In some embodiments, the AAV capsid variant described herein has the ability to enclose, e.g., encapsulate, a viral genome and/or is capable of entry into a cell, e.g., a mammalian cell. In some embodiments, the AAV capsid variant described herein may have modified tropism compared to that of a wild-type AAV capsid, e.g., the corresponding wild-type capsid.

[0944] Central Nervous System or CNS: As used herein, “central nervous system” or “CNS” refers to one of the two major subdivisions of the nervous system, which in vertebrates includes the brain and spinal cord. The central nervous system coordinates the activity of the entire nervous system.

[0945] Cervical Region: As used herein, “cervical region” refers to the region of the spinal cord comprising the cervical vertebrae C1, C2, C3, C4, C5, C6, C7, and C8.

[0946] Cis-Elements: As used herein, cis-elements or the synonymous term “cis-regulatory elements” refer to regions of non-coding DNA which regulate the transcription of nearby genes. The Latin prefix “cis” translates to “on this side.” Cis-elements are found in the vicinity of the gene, or genes, they regulate. Examples of cis-elements include a Kozak sequence, SV40 introns, or a portion of the backbone.

[0947] CNS tissue: As used herein, “CNS tissue” or “CNS tissues” refers to the tissues of the central nervous system, which in vertebrates, include the brain and spinal cord and sub-structures thereof.

[0948] CNS structures: As used herein, “CNS structures” refers to structures of the central nervous system and sub-structures thereof. Non-limiting examples of structures in the spinal cord may include, ventral horn, dorsal horn, white matter, and nervous system pathways or nuclei within. Non-limiting examples of structures in the brain include, forebrain, midbrain, hindbrain, diencephalon, telencephalon, myelencephalon, metencephalon, mesencephalon, prosencephalon, rhombencephalon, cortices, frontal lobe, parietal lobe, temporal lobe, occipital lobe, cerebrum, thalamus, hypothalamus, tectum, tegmentum, cerebellum, pons, medulla, amygdala, hippocampus, basal ganglia, corpus callosum, pituitary gland, putamen, striatum, ventricles and sub-structures thereof.

[0949] CNS Cells: As used herein, “CNS cells” refers to cells of the central nervous system and sub-structures thereof. Non-limiting examples of CNS cells include, neurons and sub-types thereof, glia, microglia, oligodendrocytes, ependymal cells and astrocytes. Non-limiting examples of neurons include sensory neurons, motor neurons, interneurons, unipolar cells, bipolar cells, multipolar cells, pseudounipolar cells, pyramidal cells, basket cells, stellate cells, Purkinje cells, Betz cells, amacrine cells, granule cell, ovoid cell, medium aspiny neurons and large aspiny neurons.

[0950] Codon optimization: As used herein, the term “codon optimization” refers to a process of changing codons of a given gene in such a manner that the polypeptide sequence encoded by the gene remains the same while the changed codons improve the process of expression of the polypeptide sequence. For example, if the polypeptide is of a human protein sequence and expressed in E. coli, expression will often be improved if codon optimization is performed on the DNA sequence to change the human codons to codons that are more effective for expression in E. coli.

[0951] Conservative amino acid substitution: As used herein, a “conservative amino acid substitution” is one in which the amino acid residue is replaced with an amino acid residue having a similar side chain. Families of amino acid residues having similar side chains have been defined in the art. These families include amino acids with basic side chains (e.g., lysine, arginine, histidine), acidic side chains (e.g., aspartic acid, glutamic acid), uncharged polar side chains (e.g., glycine, asparagine, glutamine, serine, threonine, tyrosine, cysteine), nonpolar side chains (e.g., alanine, valine, leucine, isoleucine, proline, phenylalanine, methionine, tryptophan), beta-branched side chains (e.g., threonine, valine, isoleucine) and aromatic side chains (e.g., tyrosine, phenylalanine, tryptophan, histidine).

[0952] Conserved: As used herein, the term “conserved” refers to nucleotides or amino acid residues of polynucleotide or polypeptide sequences, respectively, that are those that occur unaltered in the same position of two or more sequences being compared. Nucleotides or amino acids that are relatively conserved are those that are conserved among more related sequences than nucleotides or amino acids appearing elsewhere in the sequences.

[0953] In some embodiments, two or more sequences are said to be “completely conserved” if they are 100% identical to one another. In some embodiments, two or more sequences are said to be “highly conserved” if they are at least 70% identical, at least 80% identical, at least 90% identical, or at least 95% identical to one another. In some embodiments, two or more sequences are said to be “highly conserved” if they are about 70% identical, about 80% identical, about 90% identical, about 95%, about 98%, or about 99% identical to one another. In some embodiments, two or more sequences are said to be “conserved” if they are at least 30% identical, at least 40% identical, at least 50% identical, at least 60% identical, at least 70% identical, at least 80% identical, at least 90% identical, or at least 95% identical to one another. In some embodiments, two or more sequences are said to be “conserved” if they are about 30% identical, about 40% identical, about 50% identical, about 60% identical, about 70% identical, about 80% identical, about 90% identical, about 95% identical, about 98% identical, or about 99% identical to one another. Conservation of sequence may apply to the entire length of an oligonucleotide or polypeptide or may apply to a portion, region or feature thereof.

[0954] In some embodiments, conserved sequences are not contiguous. Those skilled in the art are able to appreciate how to achieve alignment when gaps in contiguous alignment are present between sequences, and to align corresponding residues not withstanding insertions or deletions present.

[0955] Delivery: As used herein, “delivery” refers to the act or manner of delivering a parvovirus e.g., AAV compound, substance, entity, moiety, cargo or payload to a target. Such target may be a cell, tissue, organ, organism, or system (whether biological or production).

[0956] Delivery Agent: As used herein, “delivery agent” refers to any agent which facilitates, at least in part, the delivery of one or more substances (including, but not limited to a compounds and/or compositions of the present disclosure, e.g., viral particles or AAV vectors) to targeted cells.

[0957] Delivery route: As used herein, the term “delivery route” and the synonymous term “administration route” refers to any of the different methods for providing a therapeutic agent to a subject. Routes of administration are generally classified by the location at which the substance is applied and may also be classified based on where the target of action is. Examples include, but are not limited to: intravenous administration, subcutaneous administration, oral administration, parenteral administration, enteral administration, topical administration, sublingual administration, inhalation administration, and injection administration, or other routes of administration described herein.

[0958] Derivative: As used herein, the term “derivative” refers to a composition (e.g., sequence, compound, formulation, etc.) that is derived from, or finds its basis in, a parent composition. Non-limiting examples of a parent composition include a wild-type or original amino acid or nucleic acid sequence, or an undiluted formulation. In some embodiments, a derivative is a variant of a parent composition. A derivative may differ from the parent composition by less than about 1%, less than about 5%, less than about 10%, less than about 15%, less than about 20%, less than about 25%, less than about 30%, less than about 35%, less than about 40%, less than about 45%, or less than about 50%. In certain embodiments, a derivative may differ from a parent composition by more than about 50%. In certain embodiments, a derivative may differ from a parent composition by more than about 75%. In some embodiments, a derivative may be a fragment or truncation of a parent amino acid or nucleotide sequence. As a non-limiting example, a derivative may be a sequence with a nucleotide or peptide insert as compared to a parent nucleic acid or amino acid sequence (e.g., AAVPHP.B as compared to AAV9).

[0959] Effective amount: As used herein, the term “effective amount” of an agent is that amount sufficient to effect beneficial or desired results, for example, upon single or multiple dose administration to a subject or a cell, in curing, alleviating, relieving or improving one or more symptoms of a disorder and, as such, an “effective amount” depends upon the context in which it is being applied. For example, in the context of administering an agent that treats NPC1, an effective amount of an agent is, for example, an amount sufficient to achieve treatment, as defined herein, of NPC1 as compared to the response obtained without administration of the agent.

[0960] Engineered: As used herein, embodiments of the disclosure are “engineered” when they are designed to have a feature or property, whether structural or chemical, that varies from a starting point, wild-type or native molecule. Thus, engineered agents or entities are those whose design and/or production include an act of the hand of man.

[0961] Expression: As used herein, “expression” of a nucleic acid sequence refers to one or more of the following events: (1) production of an RNA template from a DNA sequence (e.g., by transcription); (2) processing of an RNA transcript (e.g., by splicing, editing, 5′ cap formation, and/or 3′ end processing); (3) translation of an RNA into a polypeptide or protein; (4) folding of a polypeptide or protein; and/or (5) post-translational modification of a polypeptide or protein.

[0962] Excipient: As used herein, the term “excipient” refers to an inactive substance that serves as the vehicle or medium for an active pharmaceutical agent or other active substance.

[0963] Formulation: As used herein, a “formulation” includes at least a compound and/or composition of the present disclosure (e.g., a vector, AAV particle, etc.) and a delivery agent.

[0964] Fragment: A “fragment,” as used herein, refers to a contiguous portion of a whole. For example, fragments of proteins may comprise polypeptides obtained by digesting full-length protein isolated from cultured cells. In some embodiments, a fragment of a protein includes at least 3, 4, 5, 6, 7, 8, 9, 10, 11, 12, 13, 14, 15, 16, 17, 18, 19, 20, 25, 30, 35, 40, 45, 50, 55, 60, 65, 70, 75, 80, 85, 90, 95, 100, 150, 200, 250 or more amino acids. A fragment may also refer to a truncation (e.g., an N-terminal and/or C-terminal truncation) of a protein or a truncation (e.g., at the 5′ and/or 3′ end) of a nucleic acid. A protein fragment may be obtained by expression of a truncated nucleic acid, such that the nucleic acid encodes a portion of the full-length protein.

[0965] Gene expression: The term “gene expression” refers to the process by which a nucleic acid sequence undergoes successful transcription and in most instances translation to produce a protein or peptide. For clarity, when reference is made to measurement of “gene expression”, this should be understood to mean that measurements may be of the nucleic acid product of transcription, e.g., RNA or mRNA or of the amino acid product of translation, e.g., polypeptides or peptides. Methods of measuring the amount or levels of RNA, mRNA, polypeptides, and peptides are well known in the art.

[0966] Homology: As used herein, the term “homology” refers to the overall relatedness between polymeric molecules, e.g. between nucleic acid molecules (e.g. DNA molecules and/or RNA molecules) and/or between polypeptide molecules. In some embodiments, polymeric molecules are considered to be “homologous” to one another if their sequences are at least 25%, 30%, 35%, 40%, 45%, 50%, 55%, 60%, 65%, 70%, 75%, 80%, 85%, 90%, 95%, or 99% identical or similar. The term “homologous” necessarily refers to a comparison between at least two sequences (polynucleotide or polypeptide sequences). In accordance with the disclosure, two polynucleotide sequences are considered to be homologous if the polypeptides they encode are at least about 50%, 60%, 70%, 80%, 90%, 95%, or even 99% identical for at least one stretch of at least about 20 amino acids. In some embodiments, homologous polynucleotide sequences are characterized by the ability to encode a stretch of at least 4-5 uniquely specified amino acids. For polynucleotide sequences less than 60 nucleotides in length, homology is typically determined by the ability to encode a stretch of at least 4-5 uniquely specified amino acids. In accordance with the disclosure, two protein sequences are considered to be homologous if the proteins are at least about 50%, 60%, 70%, 80%, or 90% identical for at least one stretch of at least about 20 amino acids. In many embodiments, homologous protein may show a large overall degree of homology and a high degree of homology over at least one short stretch of at least 3, 4, 5, 6, 7, 8, 9, 10, 11, 12, 13, 14, 15, 16, 17, 18, 19, 20, 25, 30, 35, 40, 45, 50, or more amino acids. In many embodiments, homologous proteins share one or more characteristic sequence elements. As used herein, the term “characteristic sequence element” refers to a motif present in related proteins. In some embodiments, the presence of such motifs correlates with a particular activity (such as biological activity).

[0967] Humanized: As used herein, the term “humanized” refers to a non-human sequence of a polynucleotide or a polypeptide which has been altered to increase its similarity to its corresponding human sequence.

[0968] Identity: As used herein, the term “identity” refers to the overall relatedness between polymeric molecules, e.g., between oligonucleotide molecules (e.g. DNA molecules and/or RNA molecules) and/or between polypeptide molecules. Calculation of the percent identity of two polynucleotide sequences, for example, may be performed by aligning the two sequences for optimal comparison purposes (e.g., gaps can be introduced in one or both of a first and a second nucleic acid sequences for optimal alignment and non-identical sequences can be disregarded for comparison purposes). In certain embodiments, the length of a sequence aligned for comparison purposes is at least 30%, at least 40%, at least 50%, at least 60%, at least 70%, at least 80%, at least 90%, at least 95%, or 100% of the length of the reference sequence. The nucleotides at corresponding nucleotide positions are then compared. When a position in the first sequence is occupied by the same nucleotide as the corresponding position in the second sequence, then the molecules are identical at that position. The percent identity between the two sequences is a function of the number of identical positions shared by the sequences, taking into account the number of gaps, and the length of each gap, which needs to be introduced for optimal alignment of the two sequences. The comparison of sequences and determination of percent identity between two sequences can be accomplished using a mathematical algorithm. For example, the percent identity between two nucleotide sequences can be determined using methods such as those described in Computational Molecular Biology, Lesk, A. M., ed., Oxford University Press, New York, 1988; Biocomputing: Informatics and Genome Projects, Smith, D. W., ed., Academic Press, New York, 1993; Sequence Analysis in Molecular Biology, von Heinje, G., Academic Press, 1987; Computer Analysis of Sequence Data, Part I, Griffin, A. M., and Griffin, H. G., eds., Humana Press, New Jersey, 1994; and Sequence Analysis Primer, Gribskov, M. and Devereux, J., eds., M Stockton Press, New York, 1991; each of which is incorporated herein by reference in its entirety. For example, the percent identity between two nucleotide sequences can be determined, for example using the algorithm of Meyers and Miller (CABIOS, 1989, 4:11-17), which has been incorporated into the ALIGN program (version 2.0) using a PAM120 weight residue table, a gap length penalty of 12 and a gap penalty of 4. The percent identity between two nucleotide sequences can, alternatively, be determined using the GAP program in the GCG software package using an NWSgapdna.CMP matrix. Methods commonly employed to determine percent identity between sequences include, but are not limited to those disclosed in Carillo, H., and Lipman, D., SIAM J Applied Math., 48:1073 (1988); incorporated herein by reference in its entirety. Techniques for determining identity are codified in publicly available computer programs. Computer software to determine homology between two sequences include, but are not limited to, GCG program package, Devereux, J., et al., Nucleic Acids Research, 12(1), 387 (1984)), BLASTP, BLASTN, and FASTA Altschul, S. F. et al., J. Molecular Biol., 215, 403 (1990)).

[0969] Isolated: As used herein, the term “isolated” refers to a substance or entity that is altered or removed from the natural state, e.g., altered or removed from at least some of component with which it is associated in the natural state. For example, a nucleic acid or a peptide naturally present in a living animal is not “isolated,” but the same nucleic acid or peptide partially or completely separated from the coexisting materials of its natural state is “isolated.” An isolated nucleic acid or protein can exist in substantially purified form, or can exist in a non-native environment such as, for example, a host cell. Such polynucleotides could be part of a vector and/or such polynucleotides or polypeptides could be part of a composition, and still be isolated in that such vector or composition is not part of the environment in which it is found in nature. In some embodiments, an isolated nucleic acid is recombinant, e.g., incorporated into a vector.

[0970] Lumbar Region: As used herein, the term “lumbar region” refers to the region of the spinal cord comprising the lumbar vertebrae L1, L2, L3, L4, and L5.

[0971] Modified: As used herein, the term “modified” refers to a changed state or structure of a molecule or entity as compared with a parent or reference molecule or entity. Molecules may be modified in many ways including chemically, structurally, and functionally. In some embodiments, compounds and/or compositions of the present disclosure are modified by the introduction of non-natural amino acids, or non-natural nucleotides.

[0972] Mutation: As used herein, the term “mutation” refers to a change and/or alteration. In some embodiments, mutations may be changes and/or alterations to proteins (including peptides and polypeptides) and/or nucleic acids (including polynucleic acids). In some embodiments, mutations comprise changes and/or alterations to a protein and/or nucleic acid sequence. Such changes and/or alterations may comprise the addition, substitution and or deletion of one or more amino acids (in the case of proteins and/or peptides) and/or nucleotides (in the case of nucleic acids and or polynucleic acids). In embodiments wherein mutations comprise the addition and/or substitution of amino acids and/or nucleotides, such additions and/or substitutions may comprise 1 or more amino acid and/or nucleotide residues and may include modified amino acids and/or nucleotides. One or more mutations may result in a “mutant,” “derivative,” or “variant,” e.g., of a nucleic acid sequence or polypeptide or protein sequence.

[0973] Naturally occurring: As used herein, “naturally occurring” or “wild-type” means existing in nature without artificial aid, or involvement of the hand of man. “Naturally occurring” or “wild-type” may refer to a native form of a biomolecule, sequence, or entity.

[0974] Non-human vertebrate: As used herein, a “non-human vertebrate” includes all vertebrates except Homo sapiens, including wild and domesticated species. Examples of non-human vertebrates include, but are not limited to, mammals, such as alpaca, banteng, bison, camel, cat, cattle, deer, dog, donkey, gayal, goat, guinea pig, horse, llama, mule, pig, rabbit, reindeer, sheep water buffalo, and yak.

[0975] NPC protein: As used herein, the terms “NPC protein,” “NPC proteins,” “NPC protein,” “NPC proteins” and the like refer to one or both of proteins NPC1 (NPC intracellular cholesterol transporter 1, Ensemble gene ID: ENSG00000141458) and/or NPC2 (ENSG00000119655), homologs or variants thereof, and orthologs thereof, including non-human proteins and homologs thereof. NPC proteins include fragments, derivatives, and modifications of NPC1 and/or NPC2 proteins.

[0976] Nucleic acid: As used herein, the terms “nucleic acid,” “polynucleotide,” and “oligonucleotide” refer to any nucleic acid polymers composed of either polydeoxyribonucleotides (containing 2-deoxy-D-ribose), or polyribonucleotides (containing D-ribose), or any other type of polynucleotide that is an N glycoside of a purine or pyrimidine base, or modified purine or pyrimidine bases. There is no intended distinction in length between the term “nucleic acid,” “polynucleotide,” and “oligonucleotide,” and these terms will be used interchangeably. These terms refer only to the primary structure of the molecule. Thus, these terms include double- and single-stranded DNA, as well as double- and single-stranded RNA.

[0977] Operably linked: As used herein, the phrase “operably linked” refers to a functional connection between two or more molecules, constructs, transcripts, entities, moieties or the like.

[0978] Particle: As used herein, a “particle” is a virus comprised of at least two components, a protein capsid and a polynucleotide sequence enclosed within the capsid.

[0979] Patient: As used herein, “patient” refers to a subject who may seek or be in need of treatment, requires treatment, is receiving treatment, will receive treatment, or a subject who is under care by a trained (e.g., licensed) professional for a particular disease or condition.

[0980] Payload: As used herein, “payload” or “payload region” refers to one or more polynucleotides or polynucleotide regions encoded by or within a viral genome or an expression product of such polynucleotide or polynucleotide region, e.g., a transgene, a polynucleotide encoding a polypeptide.

[0981] Payload construct: As used herein, “payload construct” is one or more polynucleotide regions encoding or comprising a payload that is flanked on one or both sides by an inverted terminal repeat (ITR) sequence. The payload construct is a template that is replicated in a viral production cell to produce a viral genome.

[0982] Payload construct vector: As used herein, “payload construct vector” is a vector encoding or comprising a payload construct, and regulatory regions for replication and expression in bacterial cells. The payload construct vector may also comprise a component for viral expression in a viral replication cell.

[0983] Peptide: As used herein, the term “peptide” refers to a chain of amino acids that is less than or equal to about 50 amino acids long, e.g., about 5, 10, 15, 20, 25, 30, 35, 40, 45, or 50 amino acids long.

[0984] Pharmaceutically acceptable: The phrase “pharmaceutically acceptable” is employed herein to refer to those compounds, materials, compositions, and/or dosage forms which are, within the scope of sound medical judgment, suitable for use in contact with the tissues of human beings and animals without excessive toxicity, irritation, allergic response, or other problem or complication, commensurate with a reasonable benefit/risk ratio.

[0985] Pharmaceutically acceptable excipients: As used herein, the term “pharmaceutically acceptable excipient,” as used herein, refers to any ingredient other than active agents (e.g., as described herein) present in pharmaceutical compositions and having the properties of being substantially nontoxic and non-inflammatory in subjects. In some embodiments, pharmaceutically acceptable excipients are vehicles capable of suspending and/or dissolving active agents. Excipients may include, for example: antiadherents, antioxidants, binders, coatings, compression aids, disintegrants, dyes (colors), emollients, emulsifiers, fillers (diluents), film formers or coatings, flavors, fragrances, glidants (flow enhancers), lubricants, preservatives, printing inks, sorbents, suspending or dispersing agents, sweeteners, and waters of hydration. Excipients include, but are not limited to: butylated hydroxytoluene (BHT), calcium carbonate, calcium phosphate (dibasic), calcium stearate, croscarmellose, cross-linked polyvinyl pyrrolidone, citric acid, crospovidone, cysteine, ethylcellulose, gelatin, hydroxypropyl cellulose, hydroxypropyl methylcellulose, lactose, magnesium stearate, maltitol, mannitol, methionine, methylcellulose, methyl paraben, microcrystalline cellulose, polyethylene glycol, polyvinyl pyrrolidone, povidone, pregelatinized starch, propyl paraben, retinyl palmitate, shellac, silicon dioxide, sodium carboxymethyl cellulose, sodium citrate, sodium starch glycolate, sorbitol, starch (corn), stearic acid, sucrose, talc, titanium dioxide, vitamin A, vitamin E, vitamin C, and/or xylitol.

[0986] Pharmaceutically acceptable salts: Pharmaceutically acceptable salts of the compounds described herein are forms of the disclosed compounds wherein the acid or base moiety is in its salt form (e.g., as generated by reacting a free base group with a suitable organic acid). Examples of pharmaceutically acceptable salts include, but are not limited to, mineral or organic acid salts of basic residues such as amines; alkali or organic salts of acidic residues such as carboxylic acids; and the like. Representative acid addition salts include acetate, adipate, alginate, ascorbate, aspartate, benzenesulfonate, benzoate, bisulfate, borate, butyrate, camphorate, camphorsulfonate, citrate, cyclopentanepropionate, digluconate, dodecylsulfate, ethanesulfonate, fumarate, glucoheptonate, glycerophosphate, hemisulfate, heptonate, hexanoate, hydrobromide, hydrochloride, hydroiodide, 2-hydroxy-ethanesulfonate, lactobionate, lactate, laurate, lauryl sulfate, malate, maleate, malonate, methanesulfonate, 2-naphthalenesulfonate, nicotinate, nitrate, oleate, oxalate, palmitate, pamoate, pectinate, persulfate, 3-phenylpropionate, phosphate, picrate, pivalate, propionate, stearate, succinate, sulfate, tartrate, thiocyanate, toluenesulfonate, undecanoate, valerate salts, and the like. Representative alkali or alkaline earth metal salts include sodium, lithium, potassium, calcium, magnesium, and the like, as well as nontoxic ammonium, quaternary ammonium, and amine cations, including, but not limited to ammonium, tetramethylammonium, tetraethylammonium, methylamine, dimethylamine, trimethylamine, triethylamine, ethylamine, and the like. Pharmaceutically acceptable salts include the conventional non-toxic salts, for example, from non-toxic inorganic or organic acids. In some embodiments, a pharmaceutically acceptable salt is prepared from a parent compound which contains a basic or acidic moiety by conventional chemical methods. Generally, such salts can be prepared by reacting the free acid or base forms of these compounds with a stoichiometric amount of the appropriate base or acid in water or in an organic solvent, or in a mixture of the two; generally, nonaqueous media like ether, ethyl acetate, ethanol, isopropanol, or acetonitrile are used. Lists of suitable salts are found in Remington's Pharmaceutical Sciences, 17^{th} ed., Mack Publishing Company, Easton, Pa., 1985, p. 1418, Pharmaceutical Salts: Properties, Selection, and Use, P. H. Stahl and C. G. Wermuth (eds.), Wiley-VCH, 2008, and Berge et al., Journal of Pharmaceutical Science, 66, 1-19 (1977), the contents of each of which are incorporated herein by reference in their entirety.

[0987] Pharmaceutical Composition: As used herein, the term “pharmaceutical composition” or pharmaceutically acceptable composition” comprises AAV polynucleotides, AAV genomes, or AAV particle and one or more pharmaceutically acceptable excipients, solvents, adjuvants, and/or the like.

[0988] Polypeptide: As used herein, the term “polypeptide” refers to an organic polymer consisting of a large number of amino-acid residues bonded together in a chain. A monomeric protein molecule is a polypeptide.

[0989] Preventing: As used herein, the term “preventing” refers to partially or completely delaying onset of an infection, disease, disorder and/or condition; partially or completely delaying onset of one or more symptoms, features, or clinical manifestations of a particular infection, disease, disorder, and/or condition; partially or completely delaying onset of one or more symptoms, features, or manifestations of a particular infection, disease, disorder, and/or condition; partially or completely delaying progression from an infection, a particular disease, disorder and/or condition; and/or decreasing the risk of developing pathology associated with the infection, the disease, disorder, and/or condition.

[0990] Promoter: As used herein, the term “promoter” refers to a nucleic acid site to which a polymerase enzyme will bind to initiate transcription (DNA to RNA) or reverse transcription (RNA to DNA).

[0991] Protein of interest: As used herein, the terms “proteins of interest” or “desired proteins” include those provided herein and fragments, mutants, variants, or alterations thereof.

[0992] Purified: As used herein, the term “purify” means to make substantially pure or clear from one or more unwanted components, material defilement, admixture or imperfection. “Purified” refers to the state of being pure. “Purification” refers to the process of making pure. As used herein, a substance is “pure” if it is substantially free of (substantially isolated from) one or more components, e.g., one or more components found in a native context.

[0993] Region: As used herein, the term “region” refers to a zone or general area. In some embodiments, when referring to a protein or protein module, a region may comprise a linear sequence of amino acids along the protein or protein module or may comprise a three dimensional area, an epitope and/or a cluster of epitopes. In some embodiments, regions comprise terminal regions. As used herein, the term “terminal region” refers to regions located at the ends or termini of a given agent. When referring to proteins, terminal regions may comprise N- and/or C-termini. N-termini refer to the end of a protein comprising an amino acid with a free amino group. C-termini refer to the end of a protein comprising an amino acid with a free carboxyl group. N- and/or C-terminal regions may comprise the N- and/or C-termini as well as surrounding amino acids. In some embodiments, N- and/or C-terminal regions comprise from about 3 amino acids to about 30 amino acids, from about 5 amino acids to about 40 amino acids, from about 10 amino acids to about 50 amino acids, from about 20 amino acids to about 100 amino acids and/or at least 100 amino acids. In some embodiments, N-terminal regions may comprise any length of amino acids that includes the N-terminus, but does not include the C-terminus. In some embodiments, C-terminal regions may comprise any length of amino acids, which include the C-terminus, but do not comprise the N-terminus.

[0994] In some embodiments, when referring to a polynucleotide, a region may comprise a linear sequence of nucleic acids along the polynucleotide or may comprise a three dimensional area, secondary structure, or tertiary structure. In some embodiments, regions comprise terminal regions. As used herein, the term “terminal region” refers to regions located at the ends or termini of a given agent. When referring to polynucleotides, terminal regions may comprise 5′ and 3′ termini. 5′ termini refer to the end of a polynucleotide comprising a nucleic acid with a free phosphate group. 3′ termini refer to the end of a polynucleotide comprising a nucleic acid with a free hydroxyl group. 5′ and 3′ regions may there for comprise the 5′ and 3′ termini as well as surrounding nucleic acids. In some embodiments, 5′ and 3′ terminal regions comprise from about 9 nucleic acids to about 90 nucleic acids, from about 15 nucleic acids to about 120 nucleic acids, from about 30 nucleic acids to about 150 nucleic acids, from about 60 nucleic acids to about 300 nucleic acids and/or at least 300 nucleic acids. In some embodiments, 5′ regions may comprise any length of nucleic acids that includes the 5′ terminus, but does not include the 3′ terminus. In some embodiments, 3′ regions may comprise any length of nucleic acids, which include the 3′ terminus, but does not comprise the 5′ terminus.

[0995] RNA or RNA molecule: As used herein, the term “RNA” or “RNA molecule” or “ribonucleic acid molecule” refers to a polymer of ribonucleotides; the term “DNA” or “DNA molecule” or “deoxyribonucleic acid molecule” refers to a polymer of deoxyribonucleotides. DNA and RNA can be synthesized naturally, e.g., by DNA replication and transcription of DNA, respectively; or be chemically synthesized. DNA and RNA can be single-stranded (i.e., ssRNA or ssDNA, respectively) or multi-stranded (e.g., double stranded, i.e., dsRNA and dsDNA, respectively). The term “mRNA” or “messenger RNA”, as used herein, refers to a single stranded RNA that encodes the amino acid sequence of one or more polypeptide chains.

[0996] Sample: As used herein, the term “sample” refers to an aliquot or portion taken from a source and/or provided for analysis or processing. In some embodiments, a sample is from a biological source such as a tissue, cell or component part (e.g. a body fluid, including but not limited to blood, mucus, lymphatic fluid, synovial fluid, cerebrospinal fluid, saliva, amniotic fluid, amniotic cord blood, urine, vaginal fluid and semen). In some embodiments, a sample may be or comprise a homogenate, lysate or extract prepared from a whole organism or a subset of its tissues, cells or component parts, or a fraction or portion thereof, including but not limited to, for example, plasma, serum, spinal fluid, lymph fluid, the external sections of the skin, respiratory, intestinal, and genitourinary tracts, tears, saliva, milk, blood cells, tumors, organs. In some embodiments, a sample is or comprises a medium, such as a nutrient broth or gel, which may contain cellular components, such as proteins or nucleic acid molecules. In some embodiments, a “primary” sample is an aliquot of the source. In some embodiments, a primary sample is subjected to one or more processing (e.g., separation, purification, etc.) steps to prepare a sample for analysis or other use.

[0997] Serotype: As used herein, the term “serotype” refers to distinct variations in a capsid of an AAV based on surface antigens which allow epidemiologic classifications of the AAVs at the sub-species level.

[0998] Signal Sequences: As used herein, the phrase “signal sequences” refers to a sequence which can direct the transport or localization.

[0999] Single unit dose: As used herein, a “single unit dose” is a dose of any therapeutic administered in one dose/at one time/single route/single point of contact, i.e., single administration event. In some embodiments, a single unit dose is provided as a discrete dosage form (e.g., a tablet, capsule, patch, loaded syringe, vial, etc.).

[1000] Similarity: As used herein, the term “similarity” refers to the overall relatedness between polymeric molecules, e.g. between polynucleotide molecules (e.g. DNA molecules and/or RNA molecules) and/or between polypeptide molecules. Calculation of percent similarity of polymeric molecules to one another can be performed in the same manner as a calculation of percent identity, except that calculation of percent similarity takes into account conservative substitutions as is understood in the art.

[1001] Stable: As used herein “stable” refers to a compound or entity that is sufficiently robust to survive isolation to a useful degree of purity from a reaction mixture, and capable of formulation into an efficacious therapeutic agent.

[1002] Stabilized: As used herein, the term “stabilize”, “stabilized,” “stabilized region” means to make or become stable. In some embodiments, stability is measured relative to an absolute value. In some embodiments, stability is measured relative to a reference compound or entity.

[1003] Subject: As used herein, the term “subject” or “patient” refers to any organism to which a composition in accordance with the disclosure may be administered, e.g., for experimental, diagnostic, prophylactic, and/or therapeutic purposes. Similarly, “subject” or “patient” refers to an organism who may seek, who may require, who is receiving, or who will receive treatment or who is under care by a trained professional for a particular disease or condition. Typical subjects include animals (e.g., mammals such as mice, rats, rabbits, non-human primates, and humans). In certain embodiments, a subject or patient may be susceptible to or suspected of having NPC1. In certain embodiments, a subject or patient may be diagnosed with NPC1.

[1004] Substantially: As used herein, the term “substantially” refers to the qualitative condition of exhibiting total or near-total extent or degree of a characteristic or property of interest. One of ordinary skill in the biological arts will understand that biological and chemical phenomena rarely, if ever, go to completion and/or proceed to completeness or achieve or avoid an absolute result. The term “substantially” is therefore used herein to capture the potential lack of completeness inherent in many biological and chemical phenomena.

[1005] Substantially equal: As used herein as it relates to time differences between doses, the term means plus/minus 2%.

[1006] Substantially simultaneously: As used herein and as it relates to plurality of doses, the term typically means within about 2 seconds.

[1007] Suffering from: An individual who is “suffering from” a disease, disorder, and/or condition has been diagnosed with or displays one or more symptoms of a disease, disorder, and/or condition.

[1008] Susceptible to: An individual who is “susceptible to” a disease, disorder, and/or condition has not been diagnosed with and/or may not exhibit symptoms of the disease, disorder, and/or condition but harbors a propensity to develop a disease or its symptoms. In some embodiments, an individual who is susceptible to a disease, disorder, and/or condition (for example, cancer) may be characterized by one or more of the following: (1) a genetic mutation associated with development of the disease, disorder, and/or condition; (2) a genetic polymorphism associated with development of the disease, disorder, and/or condition; (3) increased and/or decreased expression and/or activity of a protein and/or nucleic acid associated with the disease, disorder, and/or condition; (4) habits and/or lifestyles associated with development of the disease, disorder, and/or condition; (5) a family history of the disease, disorder, and/or condition; and (6) exposure to and/or infection with a microbe associated with development of the disease, disorder, and/or condition. In some embodiments, an individual who is susceptible to a disease, disorder, and/or condition will develop the disease, disorder, and/or condition. In some embodiments, an individual who is susceptible to a disease, disorder, and/or condition will not develop the disease, disorder, and/or condition.

[1009] Synthetic: The term “synthetic” means produced, prepared, and/or manufactured by the hand of man. Synthesis of polynucleotides or polypeptides or other molecules of the present disclosure may be chemical or enzymatic.

[1010] Targeting: As used herein, “targeting” means the process of design and selection of nucleic acid sequence that will hybridize to a target nucleic acid and induce a desired effect.

[1011] Targeted Cells: As used herein, “target cells” or “targeted cells” refers to any one or more cells of interest. The cells may be found in vitro, in vivo, in situ or in the tissue or organ of an organism. The organism may be an animal, a mammal, a human and/or a patient. The target cells may be CNS cells or cells in CNS tissue.

[1012] Therapeutic Agent: The term “therapeutic agent” refers to any agent that, when administered to a subject has a therapeutic, diagnostic, and/or prophylactic effect and/or elicits a desired biological and/or pharmacological effect.

[1013] Therapeutically effective amount: As used herein, the term “therapeutically effective amount” means an amount of an agent to be delivered (e.g., nucleic acid, drug, therapeutic agent, diagnostic agent, prophylactic agent, etc.) that is sufficient, when administered to a subject suffering from or susceptible to an infection, disease, disorder, and/or condition, to treat, improve symptoms of, diagnose, prevent, and/or delay the onset of the infection, disease, disorder, and/or condition. In some embodiments, a therapeutically effective amount is provided in a single dose. In some embodiments, a therapeutically effective amount is administered in a dosage regimen comprising a plurality of doses. Those skilled in the art will appreciate that in some embodiments, a unit dosage form may be considered to comprise a therapeutically effective amount of a particular agent or entity if it comprises an amount that is effective when administered as part of such a dosage regimen.

[1014] Therapeutically effective outcome: As used herein, the term “therapeutically effective outcome” means an outcome that is sufficient in a subject suffering from or susceptible to an infection, disease, disorder, and/or condition, to treat, improve symptoms of, diagnose, prevent, and/or delay the onset of the infection, disease, disorder, and/or condition.

[1015] Thoracic Region: As used herein, a “thoracic region” refers to a region of the spinal cord comprising the thoracic vertebrae T1, T2, T3, T4, T5, T6, T7, T8, T9, T10, T11, and T12.

[1016] Treating: As used herein, the term “treating” refers to partially or completely alleviating, ameliorating, improving, relieving, reversing, delaying onset of, inhibiting progression of, reducing severity of, and/or reducing incidence of one or more symptoms or features of a particular infection, disease, disorder, and/or condition. Treatment may be administered to a subject who does not exhibit signs of a disease, disorder, and/or condition and/or to a subject who exhibits only early signs of a disease, disorder, and/or condition for the purpose of decreasing the risk of developing pathology associated with the disease, disorder, and/or condition.

[1017] Unmodified: As used herein, “unmodified” refers to any substance, compound or molecule prior to being changed in any way. Unmodified may, but does not always, refer to the wild-type or native form of a biomolecule or entity. Molecules or entities may undergo a series of modifications whereby each modified product may serve as the “unmodified” starting molecule or entity for a subsequent modification.

[1018] Variant: The term “variant” refers to a polypeptide or polynucleotide that has an amino acid or a nucleotide sequence that is substantially identical, e.g., having at least 70%, 75%, 80%, 85%, 90%, 95% or 99% sequence identity to a reference sequence. In some embodiments, the variant is a functional variant.

[1019] Functional Variant: The term “functional variant” refers to a polypeptide variant or a polynucleotide variant that has at least one activity of the reference sequence.

[1020] Vector: As used herein, a “vector” is any molecule or moiety which transports, transduces or otherwise acts as a carrier of a heterologous molecule. Vectors of the present disclosure may be produced recombinantly and may be based on and/or may comprise adeno-associated virus (AAV) parent or reference sequence(s). Such parent or reference AAV sequences may serve as an original, second, third or subsequent sequence for engineering vectors. In non-limiting examples, such parent or reference AAV sequences may comprise any one or more of the following sequences: a polynucleotide sequence encoding a polypeptide or multi-polypeptide, having a sequence that may be wild-type or modified from wild-type and which sequence may encode full-length or partial sequence of a protein, protein domain, or one or more subunits of NPC protein and variants thereof; a polynucleotide encoding NPC protein and variants thereof, having a sequence that may be wild-type or modified from wild-type; and a transgene encoding NPC protein and variants thereof that may or may not be modified from wild-type sequence.

[1021] Viral construct vector: As used herein, a “viral construct vector” is a vector which comprises one or more polynucleotide regions encoding or comprising Rep and or Cap protein. A viral construct vector may also comprise one or more polynucleotide region encoding or comprising components for viral expression in a viral replication cell.

[1022] Viral genome: As used herein, a “viral genome” or “vector genome” is a polynucleotide comprising at least one inverted terminal repeat (ITR) and at least one encoded payload. A viral genome encodes at least one copy of the payload.

[1023] Wild-type: As used herein, “wild-type” is a native form of a biomolecule, sequence, or entity.

### IX. Equivalents and Scope

[1024] Those skilled in the art will recognize, or be able to ascertain using no more than routine experimentation, many equivalents to the specific embodiments in accordance with the Detailed Description provided herein. The scope of the present disclosure is not intended to be limited to the above Detailed Description, but rather is as set forth in the appended claims.

[1025] In the claims, articles such as “a,” “an,” and “the” may mean one or more than one unless indicated to the contrary or otherwise evident from the context. Claims or descriptions that include “or” between one or more members of a group are considered satisfied if one, more than one, or all of the group members are present in, employed in, or otherwise relevant to a given product or process unless indicated to the contrary or otherwise evident from the context. The disclosure includes embodiments in which exactly one member of the group is present in, employed in, or otherwise relevant to a given product or process. The disclosure includes embodiments in which more than one, or the entire group members are present in, employed in, or otherwise relevant to a given product or process.

[1026] It is also noted that the term “comprising” is intended to be open and permits but does not require the inclusion of additional elements or steps. When the term “comprising” is used herein, the term “consisting of” is thus also encompassed and disclosed.

[1027] Where ranges are given, endpoints are included. Furthermore, it is to be understood that unless otherwise indicated or otherwise evident from the context and understanding of one of ordinary skill in the art, values that are expressed as ranges can assume any specific value or subrange within the stated ranges in different embodiments of the disclosure, to the tenth of the unit of the lower limit of the range, unless the context clearly dictates otherwise.

[1028] In addition, it is to be understood that any particular embodiment of the present disclosure that falls within the prior art may be explicitly excluded from any one or more of the claims. Since such embodiments are deemed to be known to one of ordinary skill in the art, they may be excluded even if the exclusion is not set forth explicitly herein. Any particular embodiment of the compositions of the disclosure (e.g., any, composition, therapeutic or active ingredient; any method of production; any method of use; etc.) can be excluded from any one or more claims, for any reason, whether or not related to the existence of prior art.

[1029] It is to be understood that the words which have been used are words of description rather than limitation, and that changes may be made within the purview of the appended claims without departing from the true scope and spirit of the disclosure in its broader aspects.

[1030] While the present disclosure has been described at some length and with some particularity with respect to the several described embodiments, it is not intended that it should be limited to any such particulars or embodiments or any particular embodiment, but it is to be construed with references to the appended claims so as to provide the broadest possible interpretation of such claims in view of the prior art and, therefore, to effectively encompass the intended scope of the disclosure.

[1031] All publications, patent applications, patents, and other references mentioned herein are incorporated by reference in their entirety. In case of conflict, the present specification, including definitions, will control. In addition, section headings, the materials, methods, and examples are illustrative only and not intended to be limiting.

### EXAMPLES

[1032] The present disclosure is further illustrated by the following non-limiting examples. Experiments described in the Examples establish that AAV-based NPC1 gene therapy treatments are superior to and/or additive with miglustat treatment in ameliorating NPC1 and related disorder progression in vivo. Overall, a research strategy was devised according to three stages: Stage 1: screening and identifying NPC protein candidates for overexpression and establishing animal models, including conducting Natural History Studies to establish baseline NPC1 disease-relevant phenotypes; Stage 2: identifying and optimizing NPC protein expression construct and initiating in vivo expression and efficacy studies; and Stage 3: selecting an optimized NPC protein expression construct and conducting exploratory route-of-administration and toxicity studies in large animal species (such as non-human primate).

### Cell Lines, Tissues, and Animal Models

[1033] Cell-lines and reagents: Standard cell-lines are used for initial screening. This includes lines from multiple species to align with in vivo studies. Since transduction of both neuronal and non-neuronal cell types are needed in vivo, two neuronal and two non-neuronal cell types are used for in vitro screening. These cell lines include naïve neuronal SK-N-AS cells (procured from ATCC), primary neuronal cultures from NPC1^{-/-} mice (see below), immortalized human hepatocytes (procured from Creative Bioarray or ATCC), NPC1 patient fibroblasts (procured from Coriell) and/or iPS Cells derived from NPC1 patients (Yu, Xiao-Hua, et al. “NPC1, intracellular cholesterol trafficking and atherosclerosis.”Clinica chimica acta 429 (2014): 69-75, the disclosure of which is incorporated by reference in its entirety). Example cell lines for use in assays described herein include fibroblast cell lines, which may be procured from Coriell Institute (Camden, N.J., United States). Fibroblast cell lines can be from healthy individual donors (e.g., Coriell catalog nos. GM00038, GM00302, GM00500, GM00969, and/or GM05758—referred to respectively herein as H1, H2, H3, H4, and H5 cell lines) or from diagnosed Niemann-Pick Disease, Type C1 patient donors (e.g., Coriell catalog nos. GM00110, GM03123, GM18436, and/or GM23162—referred to respectively herein as N1, N2, N3, and N4 cell lines). Additional cell lines for use in assays described herein include hepatocyte cell lines which may be procured from ATCC (e.g., Hep 3B2.1-7 ATCC HB-8064™ and/or Hep G2 P4 ATCC HB-8065™) and neuronal cells, e.g., iCell™ GlutaNeurons, which may be procured from Cellular Dynamics International (Madison, Wis., United States).

[1034] NPC1 homozygous mutant (−/−) mouse model: This model is procured from Jackson Laboratories (BALB/cNctr-Npc1m1N/J) and a breeding colony is established. This mouse strain expresses a premature stop codon within the mouse NPC1 gene leading to marked decrease of expression within the liver and brain. Homozygous mice are viable but sterile. When maintaining the colony, heterozygous mice are intercrossed or bred with wild-type siblings. Progressive functional deficits are evident as early as 40 days of age as measured by ataxia and changes in stride length. Also noted is the accumulation of free cholesterol, GlcCer, LacCer, Sphingomyelin, sphingosine and gangliosides within the CNS tissue. Histological endpoints include lysosomal storage/accumulation, axonal swelling, loss of cerebellar purkinje cells (day between 30 and 50) and general global brain atrophy. Microglial activation in the brain has been noted as early as ˜9 days, significant demyelination (CC, AC, CCx) has been documented at 10 days and hepatosplenomegaly is noted in post-mortem tissue. Males generally progress more rapidly than females.

[1035] Npc1^{-/-}, C57BL/6J mouse model: These mice have a phenotype that mimics those seen in the BALB/cNctr-Npc1m1N/J; however, these mice progress more rapidly, with death occurring close to 50 days of age.

[1036] Npc1tm(I1061T)Dso mutant mice: These mutant mice possess loxP sites flanking exons 14-20 of the Niemann-Pick type C1 (Npc1) gene, as well as the I1061T missense mutation commonly found in humans with the cholesterol-sphingolipid lysosomal storage disorder, Niemann-Pick type C1 (NPC1) disease. The phenotype within this model is less severe than both of the Npc1 null mice. However, these mice do express a disease relevant human Npc1 transcript.

[1037] Non-human primates are used to support both exploratory dose range finding (DRF) studies as well as to evaluate alternative routes of administration.

### Example 1. Vector Design and Synthesis

[1038] An AAV viral genome expressing a payload region comprising a polynucleotide encoding a human NPC1 polypeptide is generated. The viral genome will further encode an AAV capsid protein (e.g., an AAV capsid protein of Table 1, e.g., an AAV9 capsid protein or functional variant thereof), such that it can be packaged in an AAV particle. A promoter region regulates expression of the payload region. Without wishing to be bound by theory, it is believed that widespread NPC1 distribution throughout the periphery and CNS provides robust efficacy. Therefore, truncated ubiquitous promoters, such as EF1α, truncated EF1α, or tissue specific promoters (such as CaMKII promoter), are used to promote expression of NPC1 transgene. The promoter is engineered to express NPC1 at efficacious levels in CNS and peripheral tissues.

[1039] The viral genome can further comprise ITRs, introns, polyadenylation sequence, and/or linkers, as well as other viral genome components as described herein to optimize efficiency of the vector and expression of NPC1.

[1040] The AAV viral genome is a single-strand and comprises a codon optimized nucleotide sequence encoding an NPC1 protein for robust expression of the human NPC1 transgene. Without wishing to be bound by theory, it is believed that this approach allows for the widespread NPC1 expression that functions in synergy with the ubiquitous promoter. The design of this transgene provides the opportunity to use one vector in multiple current and proposed in vivo models, including those used for tolerability studies. A single-strand AAV viral genome comprising a wild-type nucleotide sequence encoding an NPC1 protein will also be generated.

[1041] An AAV viral genome expressing a payload region comprising a polynucleotide encoding a human NPC2 polypeptide is also generated. The viral genome will further encode an AAV capsid protein (e.g., an AAV capsid protein of Table 1, e.g., an AAV9 capsid protein or functional variant thereof), such that is can be packaged in an AAV particle. A promoter region regulates expression of the payload region. Without wishing to be bound by theory, it is believed that widespread NPC2 distribution throughout the periphery and CNS provides robust efficacy. Therefore, truncated ubiquitous promoters, such as EF1α, truncated EF1α, or tissue specific promoter (such as CaMKII promoter), is used to promote expression of NPC1 transgene. The promoter is engineered to express NPC2 efficacious levels in CNS and peripheral tissues. The viral genome can further comprise ITRs, introns, polyadenylation sequence, and/or linkers, as well as other viral genome components as described herein to optimize efficiency of the vector and expression of NPC2.

[1042] The AAV viral genome is a single-strand viral genome and comprises a codon optimized nucleotide sequence encoding an NPC2 protein for robust expression of the human NPC2 transgene. Without wishing to be bound by theory, it is believed that this approach will allow for the widespread NPC2 expression that will work in synergy with the ubiquitous promoter. The design of this transgene provides the opportunity to use one vector in multiple current and proposed in vivo models, including those used for tolerability studies. A single-strand AAV viral genome comprising a wild-type nucleotide sequence encoding an NPC1 protein will also be generated.

[1043] Generation of the transgene plasmid includes two rounds of screening. Within the first round, codon optimization is competed, generating two final codon optimized transgene plasmids. The second round of screening tests promoters, rendering 4-6 lead constructs with promoter and codon optimization.

[1044] First round screen (codon optimization): 10 transgene plasmids of choice are transfected into one selected cell type of choice for a dual dose screen (with quadruplicate transfection for each data point). Protein quantification of NPC1 or NPC2 protein by ELISA is the primary output. 10 concentration dose response curves are generated for the top 5 constructs (transfections also in quadruplicates) including calculation of the EC50s for the top 2 NPC1 and NPC2 constructs. Following codon optimization, a second round screen is completed to optimize the promoter design.

[1045] Second round screen (promoter optimization): transfections of 10 transgene plasmids using the top 2 codon optimized plasmids (1st round of screen) with 1 of 5 truncated ubiquitous promoters (with quadruplicate transfection for each data point) is performed. Protein quantification of NPC1 or NPC2 protein by ELISA is the primary output. 10 concentration dose-response curves are generated for the 8 constructs (transfections also in quadruplicates) including calculation of the EC50s for the top 4-6 NPC1 and NPC2 constructs. Confirmation of activity of these top NPC1 and NPC2 constructs (ubiquitous promoter with codon optimized nucleotide sequence encoding an NPC1 or NPC2 protein) is completed in 2 selected neuronal cell-lines and 2 selected non-neuronal cell lines (in a 10-point DRC).

### Example 2. Assay Development

[1046] NPC1/2 is overexpressed in HEK 293 cells using the AAV vector of Example 1 or other method of transfection. Western Blot and ELISA detection protocols are optimized using routine experimentation to establish assays for NPC1/2 protein detection. These and additional biochemical studies are used to validate assays and establish cell lines for additional in vitro analysis. For example, Western Blot and ELISA assays can be performed and optimized using fibroblast cell lines, which may be obtained from Coriell Institute (Camden, N.J., United States). Fibroblast cell lines can be from healthy individual donors (e.g., Coriell catalog nos. GM00038, GM00302, GM00500, GM00969, and/or GM05758—referred to respectively herein as H1, H2, H3, H4, and H5 cell lines) or from diagnosed Niemann-Pick Disease, Type C1 patient donors (e.g., Coriell catalog nos. GM00110, GM03123, GM18436, and/or GM23162 referred to respectively herein as N1, N2, N3, and N4 cell lines).

[1047] A filipin staining assay such as a known or commercially available assay is used to measure cholesterol accumulation in cells with or without functional NPC1/2. The filipin staining assay is optimized using routine experimentation. For example, filipin staining is conducted following transfection of each top NPC1 construct to determine its activity in patient fibroblasts. The EC50 of miglustat is used to set a lower limit of inclusion for these constructs. Specifically, a dose-response study using miglustat treatment of patient fibroblast cell lines is conducted. For example, doses of 10 μM, 30 μM, 100 μM, and higher doses of miglustat, e.g., up to 500 μM, are administered for 3 days or longer, e.g., up to 5 days, to patient fibroblast (from affected or NPC1 disease patients) and compared to control fibroblast cell lines (from healthy or normal donors). Filipin staining can be performed, for example, as described by Chandler, Randy J., et al. “Systemic AAV9 gene therapy improves the lifespan of mice with Niemann-Pick disease, type C1.” Human molecular genetics 26.1 (2017): 52-64 or by Vanier, Marie T., et al. “Diagnostic tests for Niemann-Pick disease type C (NP-C): A critical review.” Molecular genetics and metabolism 118.4 (2016): 244-254, the disclosures of both of which are incorporated by reference herein in their entireties.

[1048] Additional assays, including NPC1 staining, cholesterol quantification, and analysis of other cholesterol metabolism biomarkers are performed to quantify intracellular cholesterol. NPC1 staining is performed using anti-Niemann Pick C1 antibody (EPR5209, ab134113, Abcam (Cambridge, Mass., United States)) at 1:1000 to 1:2000 dilution. Cholesterol quantification is performed using Amplex™ Red Cholesterol Assay Kit (cat. no. A12216, Invitrogen). Briefly, healthy and NPC1 patient fibroblasts are cultured and subjected to 4-hour serum starvation prior to beginning the assay. Cells are collected in 0.1% SDS or Microplate Lysis Buffer (lacking sodium vanadate to avoid horseradish peroxidase inhibition). Cells are frozen overnight and the assay is carried out according to manufacturer instructions the following day. Constructs with activity superior or equal to miglustat in reducing intracellular cholesterol are selected as “hits” for in vivo testing. Oxysterol biomarkers may be assessed in plasma and cerebrospinal fluid (CSF) as a key fluid biomarker of disease progression and or treatment efficacy (Porter F D, Scherrer D E, Lanier M H, et al. Cholesterol oxidation products are sensitive and specific blood-based biomarkers for Niemann-Pick C1 disease. Sci Transl Med. 2010; 2(56):56ra81 doi:10.1126/scitranslmed.3001417, the disclosure of which is incorporated herein by reference in its entirety). For example, oxysterols are elevated in plasma of NPC-1 patients, a trait not observed in other lysosomal storage disorders. 7-KC and 3β,5α,6β-triol levels correlate with disease onset (years) and disease severity. In addition, NPC-1 mouse models display elevations in oxysterols compared to control animals. Levels of 3β,5α,6β-triol peak around disease onset (peak body weight and phenotypic deficits), with elevations seen in plasma, brain and liver. Accordingly, in vitro assays for quantifying oxysterols are optimized in sample cell lines.

[1049] Thus, the in vitro studies described are used to validate assays and reagents for further in vivo studies. The top 4-6 NPC protein expression constructs driven by a ubiquitous promoter with activity superior or equal to miglustat are identified and packaged into AAV capsid for in vivo studies.

### Example 3. Generation of Viral Genomes for the Expression of NPC1 and In Vitro Screening

### Design of Viral Genome Constructs for the Expression of an NPC1 Protein

[1050] Viral genomes were designed for AAV delivery of an NPC1 protein. The nucleotide sequence from 5′ ITR to 3′ ITR of the viral genome constructs that comprise a transgene encoding an NPC1 protein, are provided ITR_ITR 1-ITR_ITR 44 herein, which are SEQ ID NOs: 1752-1759, 1799-1821, or 1824-1836, respectively. These constructs are also summarized in Table 4, as well as Tables 13-17.

[1051] Each of these viral genome constructs comprise a nucleic acid comprising a transgene encoding an NPC1 protein. The transgene was designed to comprise a wild type nucleotide sequence encoding NPC1 (SEQ ID NO: 1747), or one of two different codon optimized nucleotide sequence encoding an NPC1 protein, SEQ ID NO: 1749 or 1750. In designing these viral genome constructs for expression of NPC1, several promoters were selected and tested (e.g., promoters as described in Tables 3 and 12), including a CMV promoter (SEQ ID NOs: 1736 or 1739-1741); a CMVie enhancer and a CMV promoter (SEQ ID NO: 1743 and 1736, respectively); a CBA promoter (SEQ ID NO: 1735 or 1738); a CMVie enhancer and a CBA promoter (SEQ ID NO: 1737 and 1735 respectively); or an EF-1α promoter variant (SEQ ID NOs: 1745 or 1782-1791, e.g., as described in Table 12).

[1052] Some of the viral genome constructs further comprised an intron region, of SEQ ID NO: 1780 and/or a Kozak sequence of SEQ ID NO: 1746. The viral constructs comprised a 5′ ITR of SEQ ID NO: 1733 or 1837; and a 3′ ITR of 1734 or 1738. The polyadenylation sequence (SEQ ID NO: 1751) was the same across all viral genome constructs designed.

Expression of NPC1 Protein from Viral Genome Constructs

[1053] The viral genome constructs encoding NPC1 generated, and investigated for expression of NPC1 protein in vitro. Use of different promoters (e.g., CBA promoters or variants thereof, CMV promoters and variants thereof, EF1a promoter variants) and/or codon optimized nucleotide sequences encoding the NPC1 protein (e.g., SEQ ID NO: 1750 or SEQ ID NO: 1749) (Table 6). An additional set of viral genome constructs were also investigated, testing different combinations of promoters and codon optimized sequences (Tables 7, 9 and 10).

[1054] In order to assess NPC1 expression, the viral genome constructs comprising a promoter operably linked to a transgene encoding were transfected into HEK293 cells. NPC1 protein level was determined by ELISA and Western Blot, and normalized to GAPDH control and transfection efficiency. The expression of NPC1 was calculated as percent overexpression relative to the reference construct (ITR_ITR 2 (SEQ ID NO: 1753) which comprises promoter variant 8 (SEQ ID NO: 1782) and the wild-type nucleotide sequence encoding NPC1 (SEQ ID NO: 1747)) (% over reference or % overexpression to reference).

[1055] As shown in Table 6 and FIG. 1, multiple constructs resulted in increased levels of NPC1 expression compared to the reference construct (ITR_ITR 2 (SEQ ID NO: 1753)). In addition, increased expression was observed with both codon optimized sequences encoding NPC1 (SEQ ID NO: 1749 or 1750), inclusion of an intron, and/or CMV-based promoters.

TABLE 6
Expression of NPC1 protein by one set of exemplary constructs

| | ITR_ITR | % over |
|---|---|---|
| Description | Construct ID | Ref.* |
| pAAVss_CBA (SEQ ID NO:1735)_wtNPC1 | 7 | −15% |
| (SEQ ID NO: 1747) | | |
| pAAVss_short CMV (SEQ ID NO: | 1 | 203% |
| 1736)_wtNPC1 | | |
| pAAVss_CMVie enhancer (SEQ ID NO: | 41 | 165% |
| 1737)_CBA (SEQ ID NO: 1735)_wtNPC1 | | |
| (SEQ ID NO: 1747) | | |
| pAAAVss_Promoter Variant 8 (SEQ ID NO: | 2 | Reference |
| 1782)_wtNPC1 (SEQ ID NO: 1747) | | |
| pAAVss_Promoter Variant 8 (SEQ ID NO: | 3 | 231% |
| 1782)_pClneo-Intron_wtNPC1 | | |
| (SEQ ID NO: 1747) | | |
| pAAVss_Promoter Variant 8 (SEQ ID NO: | 6 | 274% |
| 1782)_codon optimized NPC1 protein | | |
| coding sequence 1 (SEQ ID NO: 1749) | | |
| pAAVss_Promoter Variant 8 (SEQ ID NO: | 4 | 483% |
| 1782)_codon optimized NPC1 protein | | |
| coding sequence 2 (SEQ ID NO: 1750) | | |
| pAAVss_CBA-D4 (SEQ ID NO: 1738)_wtNPC1 | 42 | −27% |
| (SEQ ID NO: 1747) | | |
| pAAVss_CBA-D4 (SEQ ID NO: 1738)_wtNPC1 | 8 | −22% |
| (SEQ ID NO: 1747) | | |
| pAAVss_CMV-D3 (SEQ ID NO: 1739)_wtNPC1 | 5 | 372% |
| (SEQ ID NO: 1747) | | |
| pAAVss_CMV-D4 (SEQ ID NO: 1740)_wtNPC1 | 43 | 248% |
| (SEQ ID NO: 1747) | | |
| pAAVss_CMV-D6 (SEQ ID NO: 1741)_wtNPC1 | 44 | 182% |
| (SEQ ID NO: 1747) | | |
| pAAVss_Promoter Variant 8 (SEQ ID NO: | 45 | −67% |
| 1782)_NPC1_IDT | | |

* % overexpression compared to that of the reference ITR_ITR 2 (SEQ ID NO: 1753).

[1056] An addition set of exemplary of constructs encoding an NPC1 protein were investigated as shown in Table 7 and NPC1 protein expression level in HEK293 cells was measured and compared to a reference construct, ITR_ITR 2 (% overexpression compared to reference).

TABLE 7
Expression of NPC1 protein by one set of exemplary constructs (*
% overexpression compared to that of the reference ITR_ITR 2)

| | Size | ITR_ITR | % Over |
|---|---|---|---|
| Name | (Kb) | Construct ID | Ref .* |
| pAAAVss_Promoter Variant 8 (SEQ ID NO: | 4.64 | 2 | Reference |
| 1782)_wtNPC1 (SEQ ID NO: 1747) | | | |
| pAAVss_short CBA promoter (SEQ ID NO: | 4.6 | 13 | 130% |
| 1735)_codon optimized NPC1 protein coding | | | |
| sequence 2 (SEQ ID NO: 1750) | | | |
| pAAVss_short CMV promoter (SEQ ID NO: | 4.63 | 11 | 363% |
| 1736)_codon optimized NPC1 protein coding | | | |
| sequence 2 (SEQ ID NO: 1750) | | | |
| pAAVss_Promoter Variant 8 (SEQ ID NO: | 4.79 | 14 | 434% |
| 1782)_pClneo-Intron_codon optimized NPC1 | | | |
| protein coding sequence 2 (SEQ ID NO: 1750) | | | |
| pAAVss_short CBA promoter (SEQ ID NO: | 4.67 | 15 | 49% |
| 1735)_codon optimized NPC1 protein coding | | | |
| sequence 1 (SEQ ID NO: 1749) | | | |
| pAAVss_short CMV promoter (SEQ ID NO: | 4.63 | 16 | 581% |
| 1736)_codon optimized NPC1 protein coding | | | |
| sequence 1 (SEQ ID NO: 1749) | | | |
| pAAVss_Promoter Variant 8 (SEQ ID NO: | 4.79 | 17 | 423% |
| 1782)_pClneo-Intron_codon optimized NPC1 | | | |
| protein coding sequence 1 (SEQ ID NO: 1749) | | | |
| pAAVss_short CBA promoter (SEQ ID NO: | 4.82 | 18 | 72% |
| 1735)_pClneo-Intron_wtNPC1 | | | |
| (SEQ ID NO: 1747) | | | |
| pAAVss_short CMV promoter (SEQ ID NO: | 4.78 | 19 | 356% |
| 1736)_pClneo-Intron_wtNPC1 | | | |
| (SEQ ID NO: 1747) | | | |
| pAAVss_short CBA promoter (SEQ ID NO: | 4.82 | 20 | 507% |
| 1735)_pClneo-Intron_codon optimized NPC1 | | | |
| protein coding sequence 2 (SEQ ID NO: 1750) | | | |
| pAAVss_short CMV promoter (SEQ ID NO: | 4.78 | 12 | 1014% |
| 1736)_pClneo-Intron_codon optimized NPC1 | | | |
| protein coding sequence 2 (SEQ ID NO: 1750) | | | |
| pAAVss_short CBA promoter (SEQ ID NO: | 4.82 | 21 | 340% |
| 1735)_pClneo-Intron_codon optimized NPC1 | | | |
| protein coding sequence 1 (SEQ ID NO: 1749) | | | |
| pAAVss_short CMV promoter (SEQ ID NO: | 4.78 | 22 | 1248% |
| 1736)_pClneo-Intron_codon optimized NPC1 | | | |
| protein coding sequence 1 (SEQ ID NO: 1749) | | | |

[1057] Table 8 provides a direct comparison between the constructs comprising an EF-1α promoter variant (promoter variant 8, SEQ ID NO: 1782) and wild type (WT, SEQ ID NO: 1747)) or codon optimized NPC1 sequences (SEQ ID NO: 1749 or 1750) with or without an intron (SEQ ID NO: 1780).

TABLE 8
Comparison between exemplary NPC1 constructs comprising an EF-1a
promoter variant, a CMV promoter, or a CBA promoter and a wild-type
or codon optimized nucleotide sequence encoding the NPC1 protein

| | Promoter | | | | | |
|---|---|---|---|---|---|---|
| | Promoter | | | | | |
| | Variant 8 | | | | | |
| | (SEQ ID | | | | | |
| | NO: 1782) | | CBA | | CMV | |
| | without | with | without | with | without | with |
| NPC1 | intron | intron | intron | intron | intron | intron |
| wtNPC1 | ~ | 311% | −15% | 72% | 203% | 356% |
| Codon Optimized | 192% | 434% | 130% | 507% | 363% | 1014% |
| NPC1 Protein | | | | | | |
| Coding Sequence | | | | | | |
| 2 (SEQ ID | | | | | | |
| NO: 1750) | | | | | | |
| Codon Optimized | 140% | 423% | 49% | 340% | 581% | 1248% |
| NPC1 Protein | | | | | | |
| Coding Sequence | | | | | | |
| 1 (SEQ ID | | | | | | |
| NO: 1749) | | | | | | |

[1058] As demonstrated in Tables 7-8, inclusion of an intron led to increased NPC1 expression regardless which promoter was used in the construct and the use of a CMV promoter led to increased NPC1 expression relative to the reference construct. Also, both codon optimized nucleotide sequences improved expression of NPC1 protein compared to the wild-type nucleotide sequence. The EF-1a promoter variant and CBA-promoter resulted in similar expression, but the EF-1a promoter variant demonstrated greater overall consistency

[1059] Additional viral genome constructs encoding an NPC1 protein were generated using additional EF-1a promoter variants. The EF-1a promoter variants designed are summarized in Table 12 herein. More specifically, promoter variants 11 (SEQ ID NO: 1785), 13 (SEQ ID NO: 1787), 15 (SEQ ID NO: 1789), and 18 (SEQ ID NO: 1791) were designed to incorporate additional native sequences from the EF-1α wild-type promoter (SEQ ID NO: 1781) at their 5′ end (e.g., SEQ ID NOs: 1792-1795, and/or 1797). The addition of these native 5′ sequences restored transcription factor binding sites (TFBS) (Table 23), as measured by the ALGGEN PROMO promoter analysis tool containing the TRANSFAC transcription factor binding site database (version 8.3, using “all species” or “human only” selective criteria (Farre et al. Nucleic Acids Research, 31(13):3651-3653, 2003; the contents of which are incorporated by reference herein in their entirety)). These TFBS may contribute to enhanced ubiquitous expression and likelihood of transgene longevity. Promoter variants 11, 13, 15, and 18 also increase in length which is positively associated with heightened transgene expression. The 3′ end of promoter 11, 13, 15, and 18 resembled the wild-type EF-1α promoter (SEQ ID NO: 1781, e.g., at positions 235-236), which may aid in preserving regulatory influences of the core EF-1α promoter.

TABLE 23
Transcription factor binding site analysis of promoter variants 11, 13, 15, and 18

| | | Introduced | Introduced |
|---|---|---|---|
| | 5′ Bp | TFBS* | TFBS* |
| Promoter Variant | addition | (All Species) | (Human Specific) |
| Promoter Variant 11 | +14 bp | 21 | 4 |
| (SEQ ID NO: 1785) | (addition of SEQ ID NOs: | | |
| | 1795 and 1797) | | |
| Promoter Variant 13 | +19 bp | 29 | 7 |
| (SEQ ID NO: 1787) | (addition of SEQ ID NOs: | | |
| | 1792, 1795, and 1797) | | |
| Promoter Variant 15 | +30 bp | 34 | 8 |
| (SEQ ID NO: 1789) | (addition of SEQ ID NOs: | | |
| | 1793, 1795, and 1797) | | |
| Promoter Variant 18 | +41 bp | 42 | 8 |
| (SEQ ID NO: 1791) | (addition of SEQ ID NOs: | | |
| | 1794, 1795, and 1797) | | |

[1060] Table 9 summarizes the constructs tested that comprise promoter variant 11 (SEQ ID NO: 1785), promoter variant 13 (SEQ ID NO: 1787), promoter variant 15 (SEQ ID NO: 1789), or promoter variant 18 (SEQ ID NO: 1791), operably linked to a transgene encoding NPC1 (wild-type or codon optimized nucleotide sequences encoding NPC1). These constructs were transfected into HEK293 cells, and the NPC1 protein expression was measured by ELISA and/or western blot and normalized to expression of a GAPDH control and transfection efficiency. The percent overexpression compared to a reference construct (ITR_ITR2 (SEQ ID NO: 1753), which comprises promoter variant 8 (SEQ ID NO: 1782) and the wild-type nucleotide sequence encoding NPC1 (SEQ ID NO: 1747)) was then calculated for each construct tested (% overexpression to reference) (Table 9, FIGS. 2-3).

[1061] As demonstrated in FIG. 2, promoter variants 11, 13, 15, and 18, all resulted in increased NPC1 expression relative to the ITR_ITR 2 reference construct (SEQ ID NO: 1753). Further, as shown in Table 9 and FIG. 3, promoter variant 11 and promoter variant 13 both resulted in very strong expression of NPC1 relative to the reference, particularly in combination with an intron (SEQ ID NO: 1780) and/or a codon optimized nucleotide sequence encoding the NPC1 protein (SEQ ID NO: 1749 or SEQ ID NO: 1750).

TABLE 9
Expression of NPC1

| | | | | % |
|---|---|---|---|---|
| | | Size | ITR_ITR | Overexpression |
| Construct | Name | (Kb) | Construct | to Reference |
| 4 | pAAVss_Promoter Variant 8 | 4.64 | 2 | Reference |
| | (SEQ ID NO: 1782)_wtNPC1 | | | |
| | (SEQ ID NO: 1747) | | | |
| 2.35 | pAAVss_Promoter Variant 11 | 4.65 | 27 | −4% |
| | (SEQ ID NO: 1785)_wtNPC1 | | | |
| | (SEQ ID NO: 1747) | | | |
| 2.36 | pAAVss_Promoter Variant 13 | 4.65 | 28 | 23% |
| | (SEQ ID NO: 1787)_wtNPC1 | | | |
| | (SEQ ID NO: 1747) | | | |
| 2.37 | pAAVss_Promoter Variant 15 | 4.66 | 30 | N/A |
| | (SEQ ID NO: 1789)_wtNPC1 | | | |
| | (SEQ ID NO: 1747) | | | |
| 2.38 | pAAVss_Promoter Variant 18 | 4.67 | 31 | N/A |
| | (SEQ ID NO: 1791)_wtNPC1 | | | |
| | (SEQ ID NO: 1747) | | | |
| 2.39 | pAAVss_Promoter Variant 11 | 4.796 | 29 | 558% |
| | (SEQ ID NO: 1785)_Intron_wtNPC1 | | | |
| | (SEQ ID NO: 1747) | | | |
| 2.4 | pAAVss_Promoter Variant 11 | 4.65 | 9 | 582% |
| | (SEQ ID NO: 1785)_NPC1_codon | | | |
| | optimized NPC1 protein coding | | | |
| | sequence 2 (SEQ ID NO: 1750) | | | |
| 2.41 | pAAVss_Promoter Variant 11 | 4.796 | 10 | 696% |
| | (SEQ ID NO: 1785)_Intron_codon | | | |
| | optimized NPC1 protein coding | | | |
| | sequence 2 (SEQ ID NO: 1750) | | | |
| 2.42 | pAAVss_Promoter Variant 13 | 4.796 | 24 | 501% |
| | (SEQ ID NO: 1787)_Intron_wtNPC1 | | | |
| | (SEQ ID NO: 1747) | | | |
| 2.43 | pAAVss_Promoter Variant 13 | 4.65 | 25 | 520% |
| | (SEQ ID NO: 1787)_NPC1_codon | | | |
| | optimizedNPC1 protein coding | | | |
| | sequence 2 (SEQ ID NO: 1750) | | | |
| 2.44 | pAAVss_Promoter Variant 13 | 4.796 | 26 | 574% |
| | (SEQ ID NO: 1787)_Intron_codon | | | |
| | optimized NPC1 protein coding | | | |
| | sequence 2 (SEQ ID NO: 1750) | | | |

[1062] Lastly, the above described viral constructs have been formulated into particular expression vectors (e.g., plasmid backbones) for production in either mammalian cells (e.g., HEK193 cells) or insect cells (e.g., Sf9 cells).

### Example 4. Improved NPC1 Expression with Optimized Transgene Design in Multiple Cell Lines Including Patient Fibroblasts

[1063] NPC1 protein expression was assessed in healthy and NPC1 patient fibroblasts according to the assays described in Example 2. Whereas patient fibroblasts had little to no NPC1 protein expression, NPC1 protein encoding transgenes of constructs ITR_ITR 2, ITR_ITR 1, ITR_ITR 3, ITR_ITR 4, and ITR_ITR 5 (SEQ ID NOs: 1753, 1752, and 1754-1756, respectively) rescued NPC1 protein expression to at or near the expression level detected in healthy fibroblasts (FIG. 4). ITR_ITR 1 rescued NPC1 protein to near 100% relative to healthy fibroblasts. ITR_ITR 3 and ITR_ITR 5 rescued NPC1 protein to 100% or greater relative to healthy fibroblasts. ITR_ITR 4, which comprises a transgene comprising a codon optimized sequence encoding NPC1 (SEQ ID NO: 1750), rescued NPC1 protein to about 150% relative to healthy fibroblasts. These results showed that codon optimized nucleotide sequence encoding an NPC1 protein as described herein resulted in strong NPC1 protein expression in NPC1-null patient fibroblasts.

[1064] NPC1 protein expression was further assessed for constructs ITR_ITR 2, ITR_ITR 1, ITR_ITR 3, ITR_ITR 4, and ITR_ITR 5 (SEQ ID NOs: 1753, 1752, and 1754-1756, respectively) in hepatocytes (FIG. 5, left graph) and constructs ITR_ITR 2, ITR_ITR 1, ITR_ITR 3, ITR_ITR 4, ITR_ITR 5, ITR_ITR 6, and ITR_ITR 7 (SEQ ID NOs: 1753, 1752, and 1754-1758, respectively) in human neuronal cells (FIG. 5, right graph). As shown in FIG. 5, all NPC1 constructs investigated rescued NPC1 protein expression levels in both hepatocytes and neuronal cells above the expression level detected in the no treatment control. Specifically, for hepatocytes, all tested constructs rescued NPC1 protein expression to about 1.5-3 folds over no treatment control. For neuronal cells, the constructs rescued NPC1 protein expression up to 20-fold over the control group. Both ITR_ITR 4 and ITR_ITR 6 comprised transgenes comprising codon optimized nucleotide sequences encoding NPC1 (SEQ ID NO: 1750 and 1749, respectively), and therefore, these results demonstrated that codon optimized nucleotide sequence encoding an NPC1 protein as described herein resulted in strong NPC1 protein expression in one or more cell types.

[1065] NPC1 expression was also investigated for constructs ITR_ITR 9, ITR_ITR 10, ITR_ITR 11, and ITR_ITR 12 (SEQ ID NOs: 1799-1802, respectively) in human neurons (FIG. 10A) and NPC1 patient fibroblasts (FIG. 10B), which all comprise a transgene comprising a codon optimized sequence encoding the NPC1 protein (SEQ ID NO: 1750). Constructs ITR_ITR 9 and ITR_ITR 10 comprise Promoter Variant 11 (SEQ ID NO: 1785, recited as promoter A in FIG. 10A-10B) driving expression of the transgene comprising the codon optimized sequence encoding NPC1. Constructs ITR_ITR 11 and ITR_ITR 12 comprise a short CMV promoter (SEQ ID NO: 1736; recited as Promoter B in FIG. 10A-10B) driving expression of the transgene comprising the codon optimized sequence encoding NPC1. Constructs ITR_ITR 10 and ITR_ITR 12 both also comprise an intron (SEQ ID NO: 1780).

[1066] As shown in FIG. 10A, in neuronal cells, all constructs tested led to very strong NPC1 expression and increased NPC1 expression relative to an untreated control and a reference construct (ITR_ITR 2) comprising Promoter Variant 8 (SEQ ID NO: 2) driving expression of the wild-type sequence encoding NPC1 (SEQ ID NO: 1747). Further, Promoter Variant 11 led to increased expression of NPC1 compared to the CMV promoter in neurons (FIG. 10A).

[1067] As shown in FIG. 10B, in patient fibroblasts, all constructs tested led to very strong NPC1 expression and increased NPC1 expression levels relative to a healthy control fibroblasts, patient fibroblasts, and a reference construct (ITR_ITR 2) comprising Promoter Variant 8 (SEQ ID NO: 1782) driving expression of the wild-type sequence encoding NPC1 (SEQ ID NO: 1747). Further, the CMV promoter led to increased expression of NPC1 compared to Promoter Variant 11 in patient fibroblasts (FIG. 10B).

[1068] These data demonstrate that constructs comprising Promoter Variant 11 (SEQ ID NO: 1785) driving expression of a codon optimized nucleotide sequence (SEQ ID NO: 1750) encoding the NPC1 protein or the CMV promoter (SEQ ID NO: 1736) are capable of producing robust expression of NPC1, at a level higher than constructs comprising Promoter Variant 8 (SEQ ID NO: 1782) driving expression NPC1 encoded by a wild-type nucleotide sequence.

### Example 5. Reduced Cholesterol Levels with NPC1 Construct Transduction in Patient Fibroblasts

[1069] Cholesterol levels were assessed by filipin staining in healthy fibroblasts and compared to patient fibroblasts transduced with ITR_ITR 2 (SEQ ID NO: 1752) to express NPC1 protein. Transduction was performed at a range of multiplicity of infection (M.O.I.) from 0 to 1×10⁶. Patient fibroblasts receiving no NPC1 transduction showed high cholesterol levels by filipin staining, 10-12 μg/ml compared to 6-8 μg/ml for healthy fibroblasts (FIG. 6). Reduction in cholesterol levels to those seen in healthy fibroblasts was observed in a dose-dependent manner with increasing MOI.

[1070] This experiment was repeated with additional NPC1 constructs: ITR_ITR 3, ITR_ITR 4 and ITR_ITR 6 (SEQ ID NOs: 1754, 1755, or 1757), respectively). Transduction was performed at a range of multiplicity of infection (MOI) from 0 to 1×105. Patient fibroblasts receiving no NPC1 transduction showed high cholesterol levels by filipin staining, about 8 μg/ml compared to about 4 μg/ml for healthy fibroblasts (FIG. 7). Similarly, reduction in cholesterol levels to those seen in healthy fibroblasts was observed in a dose-dependent manner with increasing M.O.I.

[1071] Constructs ITR_ITR 9, ITR_ITR 10, ITR_ITR 11, and ITR_ITR 12 (SEQ ID NOs: 1799-1802, respectively), which all comprise a transgene comprising a codon optimized sequence encoding the NPC1 protein (SEQ ID NO: 1750), were also tested in this assay and transduced into patient fibroblasts. Constructs ITR_ITR 9 and ITR_ITR 10 comprise Promoter Variant 11 (SEQ ID NO: 1785) driving expression of the transgene comprising the codon optimized sequence encoding NPC1. Constructs ITR_ITR 11 and ITR_ITR 12 comprise a short CMV promoter (SEQ ID NO: 1736) driving expression of the transgene comprising the codon optimized sequence encoding NPC1. Constructs ITR_ITR 10 and ITR_ITR 12 both also comprise an intron (SEQ ID NO: 1780).

[1072] Cholesterol levels (quantified relative to a BCA control) in cells transduced by said constructs were then compared cholesterol levels in healthy control fibroblasts, untreated patient fibroblasts, or patient fibroblasts transduced with ITR_ITR 2 (SEQ ID NO: 1753; comprises Promoter Variant 8 (SEQ ID NO: 2) driving expression of the wild-type sequence encoding NPC1 (SEQ ID NO: 1747). As shown in FIG. 8, all constructs tested reduced cholesterol levels relative to untreated patient fibroblasts, and resulted in cholesterol levels similar to healthy controls.

[1073] These results show that optimized NPC1 protein transgene transduction into NPC1 patient fibroblasts effectively reduces heightened cholesterol levels to at or below levels seen in healthy fibroblasts.

### Example 6. Natural History Study

[1074] NPC1 (NPC1−/−; Jax Labs stock number 003092) mouse line was procured from Jackson laboratories. Mice were raised under controlled conditions and monitored for vital statistics and evidence of disease progression. Phenotypic and immunohistochemical analyses were performed in the NPC1 null animal model to establish a useable a relevant efficacy-based readout to support efficacy studies. Phenotypic tests included histological analysis (e.g., NPC1 staining and filipin staining) and behavioral analysis including rotarod, clasping, beam walk, gait analysis, and body weight. Benchmarks for disease progression were established. Symptomatic phenotypes for NPC1−/− mice were observable within 30 to 40 days after birth. Clinical observations of NPC1−/− mice included weight loss beginning at about 40 to 50 days after birth, tremors during tail suspension, gait ataxia, splayed limbs, urogenital prolapse, staggered gait, extended head when suspended by tail, piloerect fur, and hunched posture.

[1075] Specifically, by about 40 days of age, body weight of NPC1 null (NPC1−/−) mice started to plateau and soon decreased, while body weight of wild type mice continued to increase. Lifespan of NPC1 null mice did not exceed 12 weeks which is shorter than expected life span of healthy mice.

[1076] NPC1 null mice also showed severe deficits in motor coordination. For example, in balance beam test, in which mice were challenged to walk across a narrow bridge with 21 mm width after some training, NPC1 null mice at 6-7 weeks old took significant more time to walk across the beam, and slipped more times than wild-type mice (FIG. 9A). Similarly, in the rotarod test, in which mice were challenged to walk on a rotarod accelerating from 5 to 40 rpm for up to 180 seconds, NPC1 null mice at 4 weeks old could complete the task, but older mice fell of the rotating rod soon after the test began (FIG. 9B). In both motor coordination tests, NPC1 null mice were similar to wild-type mice at young age (4 weeks old) but their performance worsened as they aged. These behavioral analyses confirmed impaired motor coordination in NPC1 null mice, established a timeline for disease progression and could be used as simple yet consistent behavioral tests to examine for functional improvements when mice receive treatments.

[1077] Oxysterols in plasma and peripheral and central nervous system (CNS) tissues of NPC1 null and wild-type mice were measured by LC-MS in 7-8 weeks old mice. In CNS tissues, wild-type mice generally had higher levels of 24-hydroxycholesterol and 7-ketocholesterol, but not cholestane-3B, 5a, 6B-triol, than NPC1 null mice (Table 18). In periphery tissues, oxysterols in NPC1 null mice were much higher than wild-type mice, especially in the liver, spleen, and plasma (Table 19).

TABLE 18
Summary of oxysterols measured in the CNS in NPC1 null and wild-type mice

| | Brain Stem | | Cerebellum | | Cortex | | Hippocampus | |
|---|---|---|---|---|---|---|---|---|
| | (ng/g of tissue) | | (ng/g of tissue) | | (ng/g of tissue) | | (ng/g of tissue) | |
| | NPC1 | | NPC1 | | NPC1 | | NPC1 | |
| Oxysterol | Null | WT | Null | WT | Null | WT | Null | WT |
| 24-hydroxy- | 4466.3 | 8893.1 | 3738.9 | 2985.9 | 23053.3 | 27186.0 | 24437 | 39196.7 |
| cholesterol | | | | | | | | |
| 7-ketocholesterol | 1700.9 | 2361.3 | 2013.7 | 3800.9 | 1295.8 | 1622.0 | 1300.5 | 3725.3 |
| cholestane-3B, | 298.6 | 147.5 | 470.5 | 703.2 | 301.4 | 124.2 | 309.0 | 195.8 |
| 5a, 6B-triol | | | | | | | | |

TABLE 19
Summary of oxysterols (ng/g of tissue) measured in the periphery in NPC1 null

| | Heart | | GA muscle | | Liver | | Spleen | | Plasma | |
|---|---|---|---|---|---|---|---|---|---|---|
| | (ng/g of | | (ng/g of | | (ng/g of | | (ng/g of | | (ng/g of | |
| | tissue) | | tissue) | | tissue) | | tissue) | | tissue) | |
| | NPC1 | | NPC1 | | NPC1 | | NPC1 | | NPC1 | |
| Oxysterol | Null | WT | Null | WT | Null | WT | Null | WT | Null | WT |
| 24-hydroxy- | 50.6 | 25 | 72.6 | 45.2 | 278.9 | 32.8 | 117.9 | 25.4 | 13.0 | 2.7 |
| cholesterol | | | | | | | | | | |
| 7-keto- | 224.4 | 1497.7 | 12174.3 | 12397.5 | 2028.4 | 136.3 | 4364.5 | 480 | 14.5 | 6.8 |
| cholesterol | | | | | | | | | | |
| cholestane- | 86.5 | 137.7 | 128.3 | 100.4 | 916.1 | 81.1 | 2156.4 | 82.9 | 7.71 | 3.49 |
| 3B, 5a, | | | | | | | | | | |
| 6B-triol | | | | | | | | | | |

[1078] Immunnohistochemical staining of the cerebellum showed onset of neurodegeneration consistent with disease onset in NPC1 null mice. Specifically, cerebella of NPC1 mice of 35, 45, 55 and 63 days old were stained for calbindin and CD68 expression. Calbindin is a calcium binding protein responsible for buffering calcium in Purkinje neurons in response to stimulation of glutamate receptors. Staining of calbindin in the cerebellum reduced overtime, indicating a reduction in Purkinje neurons down to a complete loss by 63 days of age. On the contrary, staining of CD68 increased as the mice aged. CD68 is expressed on monocytes, macrophages and microglia (also known as the immune cells of the brain), and is commonly used as a marker of inflammation in the brain. In the cerebellum of 35 days old mice, CD68 was mostly absent. By day 55, CD68 staining could be observed at high frequency, indicating an increase in inflammation as the disease progressed.

[1079] In summary, the NPC1^{-/-} mice, BALB/cNctr-Npc1m1N/J, exhibit molecular and physiological phenotypes and progressive functional deficits as expected. This mouse model is useful to assess efficacy of treatments for NPC disease.

### Example 7. Miglustat Head-to-Head Comparison

[1080] The EC50 of miglustat is determined (see, for example, Yu, Daozhan, et al. “Niemann-Pick disease type C: induced pluripotent stem cell-derived neuronal cells for modeling neural disease and evaluating drug efficacy.” Journal of biomolecular screening 19.8 (2014): 1164-1173, the disclosure of which is incorporated by reference in its entirety) and used to set inclusion criteria for hits in Example 2. Miglustat is administered at about 1,200 mg/kg/day in some natural history study animals to provide an efficacious benchmark, for example, according to Hughes, Michael P., et al. “AAV9 intracerebroventricular gene therapy improves lifespan, locomotor function and pathology in a mouse model of Niemann-Pick type C1 disease.” Human molecular genetics 27.17 (2018): 3079-3098, the disclosure of which is incorporated by reference herein in its entirety. Base-line effects of miglustat on survival and other phenotypic readouts are evaluated.

[1081] To understand how lead constructs compare to miglustat treatment, a dose response study in patient fibroblasts using filipin staining (cholesterol) as the primary readout is conducted. The activity of lead constructs is compared directly to the EC50 of miglustat. Miglustat is administered to cells in vitro at about 100 μM for about 24 hours.

[1082] Following the identification of lead candidate, miglustat is run in parallel and in combination with lead candidate to provide a head-to-head comparator.

### Example 8. Biodistribution of AAV Genomes after Intravenous Injection

[1083] Biodistribution of AAV1, AAV9 and AAVrh10 genomes administered via facial intravenous (IV) injection to neonatal mice were determined. Briefly, wild-type Balb/c pups of 1-3 days old were injected via facial IV with 30 μl solution containing vehicle control or viral particles of AAV1, AAV9 and AAVrh10 vector carrying GFP as payload. 4 weeks following injection, mice were euthanized and tissues were collected and the amount of AAV genomes/cell in various CNS and peripheral tissues, including the heart, lungs, liver, spleen, muscle, cortex, hippocampus, cerebellum, and brainstem was quantified by PCR.

[1084] In one set of experiment, pups were injected with 9.72×10¹¹ viral genomes (vg) of AAV particles comprising an AAV1 capsid protein and a GFP payload. In peripheral tissues, average AAV1 genome counts per cell were found, from highest to lowest, in the heart (4.40 VG/cell), liver (2.91 VG/cell), lung (1.5 VG/cell), and muscle (0.82 VG/cell), in the spleen (0.158 VG/cell). AAV1 genome counts per cell in brainstem (5.45 VG/cell), hippocampus (5.37 VG/cell), and cortex (2.83 VG/cell) were higher than or similar to peripheral tissues, but were low in the cerebellum (0.66 VG/cell).

[1085] In another set of experiment, pups were injected with 1×10¹⁰ or 1×10¹¹ vg of AAV particles comprising an AAV1, AAV9, or AAVrh10 capsid protein and a GFP payload. There appeared to be a dose-response between dosages of AAV9 and AAVrh10 injections in all examined tissues. Overall, the AAV biodistribution detected in 4 CNS and 3 peripheral tissue samples were low (less than 5 genomes/cell) across all AAV vector treatments (Table 20).

TABLE 20
AAV genomes per cell in CNS and peripheral tissues

| | Tissue (Vg/cell) | | | | | | |
|---|---|---|---|---|---|---|---|
| | | | | | | | GA |
| AAV/dose | Cerebellum | Hippocampus | Cortex | Brainstem | Spleen | Liver | Muscle |
| AAV11e11 | 0.5 | 4.97 | 4.13 | 2.53 | 0.02 | 1.27 | 0.11 |
| AAV91e10 | 0.003 | 0.08 | 0.02 | 0.03 | 0.01 | 0.22 | 0.04 |
| AAV91e11 | 0.14 | 0.89 | 0.93 | 0.97 | 0.02 | 3.72 | 1.82 |
| AAVrh101e10 | 0.01 | 0.28 | 0.03 | 0.07 | 0.01 | 0.33 | 0.12 |
| AAVrh101e11 | 0.54 | 1.90 | 2.68 | 0.68 | 0.16 | 3.20 | 0.99 |

### Example 9. In Vivo Target Engagement

[1086] Top hits (4-6) identified in Example 2 are evaluated in vivo for target expression. Mice (NPC1 null, 6-10 per group) are injected. Initial studies assess IV and/or intrathalamic administration at P25. Starting dose include 1×10¹⁰, 1×10¹¹, or 1×10¹² vg/injection for IV. Mice are euthanized 4 weeks post-dose. Cortex, thalamus, brain stem, cerebellum, spinal cord, liver and lungs are collected and human NPC1 levels are quantified by ELISA. Constructs showing greater than or equal to 50% increase in protein expression (based on WT expression levels in surrogate mice) of NPC1 in the cortex, brainstem, cerebellum and liver are further tested in a time-response study. Briefly, NPC1−/− (n=6-10) mice receive an IV injection of top hits (dose determined based on initial dose-response studies). Cortex, thalamus, brain stem, cerebellum, spinal cord, liver and lungs are collected at various time-points (e.g. 4, 8 and 13 weeks) and human NPC1 mRNA and protein are quantified.

[1087] Based on in vivo target engagement and potency, 2-5 hits are selected for additional in vivo efficacy screening. Data obtained include dose and time-point of administration needed for optimal NPC1 expression. These data are used to drive experimental design for efficacy testing.

[1088] Constructs identified showing greater than or equal to 50% increase of human NPC1 protein in the cortex, brainstem, cerebellum and liver are tested in NPC1 null mice for efficacy. Mice (n=8-12) are injected with AAV particles carrying hNPC1 at determined doses and evaluated for multiple efficacy outcomes determined based on natural history studies. Up to 2 constructs are selected for additional safety and tolerability studies. Data obtained include a minimally efficacious dose (MED) for in vivo efficacy, data related to therapeutic index (efficacious dose) and potential tolerability findings. These data, in combination with target engagement data are used to drive experimental design for safety and tolerability studies.

### Example 10. In Vivo Evaluation of Vectorized Viral Genomes Designed to Express NPC1

[1089] This example investigates the biodistribution and NPC1 expression of the viral genome constructs ITR_ITR 9, ITR_ITR 10, ITR_ITR 11, and ITR_ITR 12 (SEQ ID NOs: 1799-1802, respectively), which all comprise a transgene comprising a codon optimized sequence encoding the NPC1 protein (SEQ ID NO: 1750). Constructs ITR_ITR 9 and ITR_ITR 10 comprise Promoter Variant 11 (SEQ ID NO: 1785) and constructs ITR_ITR 11 and ITR_ITR 12 comprise a short CMV promoter (SEQ ID NO: 1736). Constructs ITR_ITR 10 and ITR_ITR 12 both also comprise an intron (SEQ ID NO: 1780). These constructs were compared to a reference construct (ITR_ITR 2) comprising Promoter Variant 8 (SEQ ID NO: 2) driving expression of the wild-type sequence encoding NPC1 (SEQ ID NO: 1747). These constructs were vectorized in an AAV9 capsid (e.g., AAV9.ITR_ITR2, AAV9.ITR_ITR9, AAV9.ITR_ITR 10, AAV9.ITR_ITR 11, and AAV9.ITR_ITR 12).

[1090] Neonatal Balb/c wild type mice (ages P1-P3) were intravenously injected into the facial vein with 1e14, 1e13, or 1e12 Vg/kg of AAV9.ITR_ITR2, AAV9.ITR_ITR9, AAV9.ITR_ITR 10, AAV9.ITR_ITR 11, and AAV9.ITR_ITR 12, or a vehicle control. At 28-days post-IV injection various CNS (e.g., cortex, hippocampus, brainstem, and cerebellum) and peripheral tissues (e.g., liver) were harvested to measure viral genome (VG) biodistribution (VG/cell) and NPC1 expression. All animals treated remained healthy and there was no significant difference in the body weight between the AAV9.ITR_ITR2, AAV9.ITR_ITR9, AAV9.ITR_ITR 10, AAV9.ITR_ITR 11, and AAV9.ITR_ITR 12 treated mice and the mice treated with the vehicle control.

[1091] Endogenous murine NPC1 levels normalized to XPNEP1 was low and comparable across all treated and untreated mice. Expression of human NPC1 (hNPC1) (transgene specific) was quantified relative to endogenous, murine NPC1 in the cortex, hippocampus, brainstem, cerebellum, and liver as shown in Table 21 and FIGS. 11A-11E. All of the mice treated with 1e14 Vg/cell of AAV9.ITR_ITR9, AAV9.ITR_ITR 10, AAV9.ITR_ITR 11, and AAV9.ITR_ITR 12 comprising a codon-optimized nucleotide sequence encoding NPC1 (SEQ ID NO: 1750), showed increased NPC1 expression in the CNS tissues (cortex, hippocampus, brainstem, cerebellum) compared to the vehicle treated control and the mice treated with the AAV9.ITR_ITR2 construct comprising a wild-type sequence encoding NPC1 (SEQ ID NO: 1747) (Table 21 and FIGS. 11A-11D). Construct AAV9.ITR_ITR12 which comprised an intron (SEQ ID NO: 1780), CMV promoter (SEQ ID NO: 1736), as well as a codon optimized nucleotide sequence encoding the NPC1 protein (SEQ ID NO: 1750) resulted in the greatest increase in NPC1 expression relative to the AAV9.ITR_ITR2 construct comprising the wild-type sequence encoding NPC1 (SEQ ID NO: 1747), Promoter Variant 8 (SEQ ID NO: 2), and no intron, in the cortex (FIG. 11A), hippocampus (FIG. 11B), cerebellum (FIG. 11C), and brainstem (FIG. 11D) (Table 21). With respect to the liver, the mice treated with the AAV9.ITR_ITR2 construct demonstrated the highest level of NPC1 expression (FIG. 11E and Table 21). Additionally, as shown in Table 21, a dose response in NPC1 expression levels was observed following IV injection of 1e12, 1e13, or 1e14 Vg/cell of the viral constructs in the neonatal mice.

TABLE 21
Average Relative human NPC1 (hNPC1) Expression (hNPC1/mNPC1)

| Construct | Dose (vg/kg) | Cortex | Hippocampus | Brainstem | Cerebellum | Liver |
|---|---|---|---|---|---|---|
| ITR_ITR10 | 1.00E+14 | 24.84 | 13.68 | 4.89 | 3.51 | 4.32 |
| | 1.00E+13 | 1.11 | 1.30 | 0.34 | 0.83 | 0.69 |
| | 1.00E+12 | 0.07 | 0.07 | 0.03 | 0.08 | 0.11 |
| ITR_ITR12 | 1.00E+14 | 7.44 | 9.80 | 3.61 | 4.43 | 3.26 |
| | 1.00E+13 | 0.24 | 0.25 | 0.13 | 0.18 | 1.40 |
| | 1.00E+12 | 0.08 | 0.08 | 0.06 | 0.05 | 0.31 |

[1092] Biodistribution (VG/cell) was compared to hNPC1 expression (relative to mNPC1 levels). Approximately 24× hNPC1/Vg was observed in the cortex, 4× hNPC1/Vg was observed in cerebellum, and 0.07× hNPC1/Vg was observed in the liver in mice treated with AAV9.ITR_ITR10. Approximately 16× hNPC1/Vg was observed in the cortex, 8× hNPC1/Vg was observed in cerebellum, and 0.21× hNPC1/Vg was observed in the liver in mice treated with AAV9.ITR_ITR12.

[1093] These data show that inclusion of an intron as well as the use of a codon-optimized nucleotide sequence encoding the NPC1 protein (e.g., SEQ ID NO: 1750) enhance expression of NPC1 in the CNS. The ITR_ITR 9, ITR_ITR 10, ITR_ITR 11, and ITR_ITR 12 (SEQ ID NOs: 1799-1802, respectively) constructs could therefore be used in the treatment of disorders associated with a lack of NPC1 expression, such as a lysosomal storage disease or Niemann-Pick disease type C1.

### Example 11: Bioinformatics Analysis of Wild-Type and Optimized Sequences Encoding an NPC1 Protein

[1094] Bioinformatics analysis on the sequence level was performed to differentiate between viral genome constructs encoding an NPC1 protein, wherein the NPC1 protein is encoded by a wild-type nucleotide sequence of SEQ ID NO: 1747 (e.g., the nucleotide sequence encoding the NPC1 protein of ITR_ITR2, as shown in Table 4) and a optimized nucleotide sequence of SEQ ID NO: 1750 (e.g., the nucleotide sequence encoding the GBA protein of ITR_ITR9-ITR_ITR12, as shown in Table 4 and 13-17).

[1095] Briefly, sequence-level differentiation criteria, such as GC content, microRNA binding, and codon usage, were assessed using mRNA-based sequence analysis tools (e.g., Rare Codon Analyzer tool by Agarwal, Shivangi, et al., Cellular microbiology, 17(10): 1494-1509, 2015; and miRDB by Chen & Wang, 2020, Nucleic Acids Res, 48(D1): D127-D131; the contents of each herein incorporated by reference in its entirety).

[1096] Using miRDB (Chen & Wang, 2020, supra), the optimized nucleotide sequence encoding an NPC1 protein of SEQ ID NO: 1750 and the wild-type nucleotide sequence encoding an NPC1 protein of SEQ ID NO: 1747 were assessed for predicative miRNA binding sites. Predictive microRNA binding sites were unique between the WT (SEQ ID NO: 1747) and codon optimized (SEQ ID NO: 1750) NPC1 coding sequences and exhibited no overlap, demonstrating strong sequence divergence. While strictly predictive, microRNA binding can influence mRNA stability and resulting protein abundance.

TABLE 22
miRDB Summary of miRNA Binding

| | Total microRNA | High Confidence |
|---|---|---|
| 5′ Bp | Binding | Binding |
| addition | Sites | Sites |
| WT (SEQ ID | 77 | 12 |
| NO: 1747) | | |
| Optimized (SEQ | 79 | 9 |
| ID NO: 1750) | | |

[1097] The GC content was also assessed across the entire 3.7kb sequence of the optimized nucleotide sequence of SEQ ID NO: 1750 and the wild-type nucleotide sequence encoding of SEQ ID NO: 1747, using the GC Content Calculator. The wild-type nucleotide sequence of SEQ ID NO: 1747 and the optimized nucleotide sequence of SEQ ID NO: 1750 maintained a similar GC content ratio with regards to peaks and valleys. It is therefore expected that both the wild type (SEQ ID NO: 1747) and the optimized (SEQ ID NO: 1750) nucleotide sequences encoding an NPC1 protein will maintain similar translation kinetics needed for successful protein folding (changes in translational kinetics can result in misfolded protein). Additionally, the optimization that resulted in SEQ ID NO: 1750 shifted the overall GC content from 49.6% (WT) to 56.7% (optimized), and this can increase transcriptional speed and result in greater mRNA abundance.

[1098] Codon usage was then analyzed between the optimized nucleotide sequence of SEQ ID NO: 1750 and the wild-type nucleotide sequence encoding of SEQ ID NO: 1747 using the Rare Codon Analyzer tool (Agarwal, Shivangi, et al., supra). The Codon Adaptation Index (CAI) value, which measures the codon usage similarity between a gene and the host species, was calculated for each sequence. The wild-type nucleotide sequence of SEQ ID NO: 1747 had a CAI value of 0.76, and the optimized nucleotide sequence of SEQ ID NO: 1750 had a CAI value of 0.95. CAI indexes range from 0 to 1, where values closer to 1 have a higher likelihood of successful heterologous gene expression in the host species due to species-specific codon preferences. The optimization that resulted in SEQ ID NO: 1750 shifted the CAI score from 0.76 (CAI score of the wild-type nucleotide sequence of SEQ ID NO: 1747) to 0.95, which increased the theoretical expression potential in humans by incorporating more commonly used codons (versus rare codons) in the coding sequence.

The application's sequence listing, which the Patent Office published only in electronic form, follows.

SEQUENCE LISTING (1845 sequences)

SEQ ID NO: 1 - protein, 743 aa, Artificial Sequence
  source: /note="Description of Artificial Sequence: Synthetic polypeptide"
MAADGYLPDWLEDNLSEGIREWWALKPGAPQPKANQQHQDNARGLVLPGYKYLGPGNGLDKGEPVNAADAAALEHDKAYDQQLKAGDNPYLKYNHADAEFQERLKEDTSFGGNLGRAVFQAKKRLLEPLGLVEEAAKTAPGKKRPVEQSPQEPDSSAGIGKSGAQPAKKRLNFGQTGDTESVPDPQPIGEPPAAPSGVGSLTMASGGGAPVADNNEGADGVGSSSGNWHCDSQWLGDRVITTSTRTWALPTYNNHLYKQISNSTSGGSSNDNAYFGYSTPWGYFDFNRFHCHFSPRDWQRLINNNWGFRPKRLNFKLFNIQVKEVTDNNGVKTIANNLTSTVQVFTDSDYQLPYVLGSAHEGCLPPFPADVFMIPQYGYLTLNDGSQAVGRSSFYCLEYFPSQMLRTGNNFQFSYEFENVPFHSSYAHSQSLDRLMNPLIDQYLYYLSKTINGSGQNQQTLKFSVAGPSNMAVQGRNYIPGPSYRQQRVSTTVTQNNNSEFAWPGASSWALNGRNSLMNPGPAMASHKEGEDRFFPLSGSLIFGKQGTGRDNVDADKVMITNEEEIKTTNPVATESYGQVATNHQSDGTLAVPFKAQAQTGWVQNQGILPGMVWQDRDVYLQGPIWAKIPHTDGNFHPSPLMGGFGMKHPPPQILIKNTPVPADPPTAFNKDKLNSFITQYSTGQVSVEIEWELQKENSKRWNPEIQYTSNYYKSNNVEFAVNTEGVYSEPRPIGTRYLTRNL

SEQ ID NO: 2 - DNA, 2232 bp, Artificial Sequence
  source: /note="Description of Artificial Sequence: Synthetic polynucleotide"
atggctgccgatggttatcttccagattggctcgaggacaaccttagtgaaggaattcgcgagtggtgggctttgaaacctggagcccctcaacccaaggcaaatcaacaacatcaagacaacgctcgaggtcttgtgcttccgggttacaaataccttggacccggcaacggactcgacaagggggagccggtcaacgcagcagacgcggcggccctcgagcacgacaaggcctacgaccagcagctcaaggccggagacaacccgtacctcaagtacaaccacgccgacgccgagttccaggagcggctcaaagaagatacgtcttttgggggcaacctcgggcgagcagtcttccaggccaaaaagaggcttcttgaacctcttggtctggttgaggaagcggctaagacggctcctggaaagaagaggcctgtagagcagtctcctcaggaaccggactcctccgcgggtattggcaaatcgggtgcacagcccgctaaaaagagactcaatttcggtcagactggcgacacagagtcagtcccagaccctcaaccaatcggagaacctcccgcagccccctcaggtgtgggatctcttacaatggcttcaggtggtggcgcaccagtggcagacaataacgaaggtgccgatggagtgggtagttcctcgggaaattggcattgcgattcccaatggctgggggacagagtcatcaccaccagcacccgaacctgggccctgcccacctacaacaatcacctctacaagcaaatctccaacagcacatctggaggatcttcaaatgacaacgcctacttcggctacagcaccccctgggggtattttgacttcaacagattccactgccacttctcaccacgtgactggcagcgactcatcaacaacaactggggattccggcctaagcgactcaacttcaagctcttcaacattcaggtcaaagaggttacggacaacaatggagtcaagaccatcgccaataaccttaccagcacggtccaggtcttcacggactcagactatcagctcccgtacgtgctcgggtcggctcacgagggctgcctcccgccgttcccagcggacgttttcatgattcctcagtacgggtatctgacgcttaatgatggaagccaggccgtgggtcgttcgtccttttactgcctggaatatttcccgtcgcaaatgctaagaacgggtaacaacttccagttcagctacgagtttgagaacgtacctttccatagcagctacgctcacagccaaagcctggaccgactaatgaatccactcatcgaccaatacttgtactatctctcaaagactattaacggttctggacagaatcaacaaacgctaaaattcagtgtggccggacccagcaacatggctgtccagggaagaaactacatacctggacccagctaccgacaacaacgtgtctcaaccactgtgactcaaaacaacaacagcgaatttgcttggcctggagcttcttcttgggctctcaatggacgtaatagcttgatgaatcctggacctgctatggccagccacaaagaaggagaggaccgtttctttcctttgtctggatctttaatttttggcaaacaaggaactggaagagacaacgtggatgcggacaaagtcatgataaccaacgaagaagaaattaaaactactaacccggtagcaacggagtcctatggacaagtggccacaaaccaccagagtgatgggactttggcggtgccttttaaggcacaggcgcagaccggctgggttcaaaaccaaggaatacttccgggtatggtttggcaggacagagatgtgtacctgcaaggacccatttgggccaaaattcctcacacggacggcaactttcacccttctccgctgatgggagggtttggaatgaagcacccgcctcctcagatcctcatcaaaaacacacctgtacctgcggatcctccaacggccttcaacaaggacaagctgaactctttcatcacccagtattctactggccaagtcagcgtggagatcgagtgggagctgcagaaggaaaacagcaagcgctggaacccggagatccagtacacttccaactattacaagtctaataatgttgaatttgctgttaatactgaaggtgtatatagtgaaccccgccccattggcaccagatacctgactcgtaatctgtaa

SEQ ID NO: 3 - DNA, 2232 bp, Artificial Sequence
  source: /note="Description of Artificial Sequence: Synthetic polynucleotide"
atggctgccgatggttatcttccagattggctcgaggacaaccttagtgaaggaattcgcgagtggtgggctttgaaacctggagcccctcaacccaaggcaaatcaacaacatcaagacaacgctcgaggtcttgtgcttccgggttacaaataccttggacccggcaacggactcgacaagggggagccggtcaacgcagcagacgcggcggccctcgagcacgacaaggcctacgaccagcagctcaaggccggagacaacccgtacctcaagtacaaccacgccgacgccgagttccaggagcggctcaaagaagatacgtcttttgggggcaacctcgggcgagcagtcttccaggccaaaaagaggcttcttgaacctcttggtctggttgaggaagcggctaagacggctcctggaaagaagaggcctgtagagcagtctcctcaggaaccggactcctccgcgggtattggcaaatcgggtgcacagcccgctaaaaagagactcaatttcggtcagactggcgacacagagtcagtcccagaccctcaaccaatcggagaacctcccgcagccccctcaggtgtgggatctcttacaatggcttcaggtggtggcgcaccagtggcagacaataacgaaggtgccgatggagtgggtagttcctcgggaaattggcattgcgattcccaatggctgggggacagagtcatcaccaccagcacccgaacctgggccctgcccacctacaacaatcacctctacaagcaaatctccaacagcacatctggaggatcttcaaatgacaacgcctacttcggctacagcaccccctgggggtattttgacttcaacagattccactgccacttctcaccacgtgactggcagcgactcatcaacaacaactggggattccggcctaagcgactcaacttcaagctcttcaacattcaggtcaaagaggttacggacaacaatggagtcaagaccatcgccaataaccttaccagcacggtccaggtcttcacggactcagactatcagctcccgtacgtgctcgggtcggctcacgagggctgcctcccgccgttcccagcggacgttttcatgattcctcagtacgggtatctgacgcttaatgatggaagccaggccgtgggtcgttcgtccttttactgcctggaatatttcccgtcgcaaatgctaagaacgggtaacaacttccagttcagctacgagtttgagaacgtacctttccatagcagctacgctcacagccaaagcctggaccgactaatgaatccactcatcgaccaatacttgtactatctctcaaagactattaacggttctggacagaatcaacaaacgctaaaattcagtgtggccggacccagcaacatggctgtccagggaagaaactacatacctggacccagctaccgacaacaacgtgtctcaaccactgtgactcaaaacaacaacagcgaatttgcttggcctggagcttcttcttgggctctcaatggacgtaatagcttgatgaatcctggacctgctatggccagccacaaagaaggagaggaccgtttctttcctttgtctggatctttaatttttggcaaacaaggaactggaagagacaacgtggatgcggacaaagtcatgataaccaacgaagaagaaattaaaactactaacccggtagcaacggagtcctatggacaagtggccacaaaccaccagagtgcccaaactttggcggtgccttttaaggcacaggcgcagaccggctgggttcaaaaccaaggaatacttccgggtatggtttggcaggacagagatgtgtacctgcaaggacccatttgggccaaaattcctcacacggacggcaactttcacccttctccgctgatgggagggtttggaatgaagcacccgcctcctcagatcctcatcaaaaacacacctgtacctgcggatcctccaacggccttcaacaaggacaagctgaactctttcatcacccagtattctactggccaagtcagcgtggagatcgagtgggagctgcagaaggaaaacagcaagcgctggaacccggagatccagtacacttccaactattacaagtctaataatgttgaatttgctgttaatactgaaggtgtatatagtgaaccccgccccattggcaccagatacctgactcgtaatctgtaa

SEQ ID NO: 4 - protein, 743 aa, Artificial Sequence
  source: /note="Description of Artificial Sequence: Synthetic polypeptide"
MAADGYLPDWLEDNLSEGIREWWALKPGAPQPKANQQHQDNARGLVLPGYKYLGPGNGLDKGEPVNAADAAALEHDKAYDQQLKAGDNPYLKYNHADAEFQERLKEDTSFGGNLGRAVFQAKKRLLEPLGLVEEAAKTAPGKKRPVEQSPQEPDSSAGIGKSGAQPAKKRLNFGQTGDTESVPDPQPIGEPPAAPSGVGSLTMASGGGAPVADNNEGADGVGSSSGNWHCDSQWLGDRVITTSTRTWALPTYNNHLYKQISNSTSGGSSNDNAYFGYSTPWGYFDFNRFHCHFSPRDWQRLINNNWGFRPKRLNFKLFNIQVKEVTDNNGVKTIANNLTSTVQVFTDSDYQLPYVLGSAHEGCLPPFPADVFMIPQYGYLTLNDGSQAVGRSSFYCLEYFPSQMLRTGNNFQFSYEFENVPFHSSYAHSQSLDRLMNPLIDQYLYYLSRTINGSGQNQQTLKFSVAGPSNMAVQGRNYIPGPSYRQQRVSTTVTQNNNSEFAWPGASSWALNGRNSLMNPGPAMASHKEGEDRFFPLSGSLIFGKQGTGRDNVDADKVMITNEEEIKTTNPVATESYGQVATNHQSDGTLAVPFKAQAQTGWVQNQGILPGMVWQDRDVYLQGPIWAKIPHTDGNFHPSPLMGGFGMKHPPPQILIKNTPVPADPPTAFNKDKLNSFITQYSTGQVSVEIEWELQKENSKRWNPEIQYTSNYYKSNNVEFAVNTEGVYSEPRPIGTRYLTRNL

SEQ ID NO: 5 - protein, 743 aa, Artificial Sequence
  source: /note="Description of Artificial Sequence: Synthetic polypeptide"
MAADGYLPDWLEDNLSEGIREWWALKPGAPQPKANQQHQDNARGLVLPGYKYLGPGNGLDKGEPVNAADAAALEHDKAYDQQLKAGDNPYLKYNHADAEFQERLKEDTSFGGNLGRAVFQAKKRLLEPLGLVEEAAKTAPGKKRPVEQSPQEPDSSAGIGKSGAQPAKKRLNFGQTGDTESVPDPQPIGEPPAAPSGVGSLTMASGGGAPVADNNEGADGVGSSSGNWHCDSQWLGDRVITTSTRTWALPTYNNHLYKQISNSTSGGSSNDNAYFGYSTPWGYFDFNRFHCHFSPRDWQRLINNNWGFRPKRLNFKLFNIQVKEVTDNNGVKTIANNLTSTVQVFTDSDYQLPYVLGSAHEGCLPPFPADVFMIPQYGYLTLNDGSQAVGRSSFYCLEYFPSQMLRTGNNFQFSYEFENVPFHSSYAHSQSLDRLMNPLIDQYLYYLSRTINGSGQNQQTLKFSVAGPSNMAVQGRNYIPGPSYRQQRVSTTVTQNNNSEFAWPGASSWALNGRNSLMNPGPAMASHKEGEDRFFPLSGSLIFGKQGTGRDNVDADKVMITNEEEIKTTNPVATESYGQVATNHQSAQTLAVPFKAQAQTGWVQNQGILPGMVWQDRDVYLQGPIWAKIPHTDGNFHPSPLMGGFGMKHPPPQILIKNTPVPADPPTAFNKDKLNSFITQYSTGQVSVEIEWELQKENSKRWNPEIQYTSNYYKSNNVEFAVNTEGVYSEPRPIGTRYLTRNL

SEQ ID NO: 6 - DNA, 2232 bp, Artificial Sequence
  source: /note="Description of Artificial Sequence: Synthetic polynucleotide"
atggctgccgatggttatcttccagattggctcgaggacaaccttagtgaaggaattcgcgagtggtgggctttgaaacctggagcccctcaacccaaggcaaatcaacaacatcaagacaacgctcgaggtcttgtgcttccgggttacaaataccttggacccggcaacggactcgacaagggggagccggtcaacgcagcagacgcggcggccctcgagcacgacaaggcctacgaccagcagctcaaggccggagacaacccgtacctcaagtacaaccacgccgacgccgagttccaggagcggctcaaagaagatacgtcttttgggggcaacctcgggcgagcagtcttccaggccaaaaagaggcttcttgaacctcttggtctggttgaggaagcggctaagacggctcctggaaagaagaggcctgtagagcagtctcctcaggaaccggactcctccgcgggtattggcaaatcgggtgcacagcccgctaaaaagagactcaatttcggtcagactggcgacacagagtcagtcccagaccctcaaccaatcggagaacctcccgcagccccctcaggtgtgggatctcttacaatggcttcaggtggtggcgcaccagtggcagacaataacgaaggtgccgatggagtgggtagttcctcgggaaattggcattgcgattcccaatggctgggggacagagtcatcaccaccagcacccgaacctgggccctgcccacctacaacaatcacctctacaagcaaatctccaacagcacatctggaggatcttcaaatgacaacgcctacttcggctacagcaccccctgggggtattttgacttcaacagattccactgccacttctcaccacgtgactggcagcgactcatcaacaacaactggggattccggcctaagcgactcaacttcaagctcttcaacattcaggtcaaagaggttacggacaacaatggagtcaagaccatcgccaataaccttaccagcacggtccaggtcttcacggactcagactatcagctcccgtacgtgctcgggtcggctcacgagggctgcctcccgccgttcccagcggacgttttcatgattcctcagtacgggtatctgacgcttaatgatggaagccaggccgtgggtcgttcgtccttttactgcctggaatatttcccgtcgcaaatgctaagaacgggtaacaacttccagttcagctacgagtttgagaacgtacctttccatagcagctacgctcacagccaaagcctggaccgactaatgaatccactcatcgaccaatacttgtactatctctctagaactattaacggttctggacagaatcaacaaacgctaaaattcagtgtggccggacccagcaacatggctgtccagggaagaaactacatacctggacccagctaccgacaacaacgtgtctcaaccactgtgactcaaaacaacaacagcgaatttgcttggcctggagcttcttcttgggctctcaatggacgtaatagcttgatgaatcctggacctgctatggccagccacaaagaaggagaggaccgtttctttcctttgtctggatctttaatttttggcaaacaaggtaccggcagagacaacgtggatgcggacaaagtcatgataaccaacgaagaagaaattaaaactactaacccggtagcaacggagtcctatggacaagtggccacaaaccaccagagtgcccaaactttggcggtgccttttaaggcacaggcgcagaccggttgggttcaaaaccaaggaatacttccgggtatggtttggcaggacagagatgtgtacctgcaaggacccatttgggccaaaattcctcacacggacggcaactttcacccttctccgctgatgggagggtttggaatgaagcacccgcctcctcagatcctcatcaaaaacacacctgtacctgcggatcctccaacggccttcaacaaggacaagctgaactctttcatcacccagtattctactggccaagtcagcgtggagatcgagtgggagctgcagaaggaaaacagcaagcgctggaacccggagatccagtacacttccaactattacaagtctaataatgttgaatttgctgttaatactgaaggtgtatatagtgaaccccgccccattggcaccagatacctgactcgtaatctgtaa

SEQ ID NO: 7 - protein, 736 aa, Artificial Sequence
  source: /note="Description of Artificial Sequence: Synthetic polypeptide"
MAADGYLPDWLEDNLSEGIREWWALKPGAPQPKANQQHQDNARGLVLPGYKYLGPGNGLDKGEPVNAADAAALEHDKAYDQQLKAGDNPYLKYNHADAEFQERLKEDTSFGGNLGRAVFQAKKRLLEPLGLVEEAAKTAPGKKRPVEQSPQEPDSSAGIGKSGAQPAKKRLNFGQTGDTESVPDPQPIGEPPAAPSGVGSLTMASGGGAPVADNNEGADGVGSSSGNWHCDSQWLGDRVITTSTRTWALPTYNNHLYKQISNSTSGGSSNDNAYFGYSTPWGYFDFNRFHCHFSPRDWQRLINNNWGFRPKRLNFKLFNIQVKEVTDNNGVKTIANNLTSTVQVFTDSDYQLPYVLGSAHEGCLPPFPADVFMIPQYGYLTLNDGSQAVGRSSFYCLEYFPSQMLRTGNNFQFSYEFENVPFHSSYAHSQSLDRLMNPLIDQYLYYLSRTIQSSQTPRQTLKFSVAGPSNMAVQGRNYIPGPSYRQQRVSTTVTQNNNSEFAWPGASSWALNGRNSLMNPGPAMASHKEGEDRFFPLSGSLIFGKQGTGRDNVDADKVMITNEEEIKTTNPVATESYGQVATNHQSAQAQAQTGWVQNQGILPGMVWQDRDVYLQGPIWAKIPHTDGNFHPSPLMGGFGMKHPPPQILIKNTPVPADPPTAFNKDKLNSFITQYSTGQVSVEIEWELQKENSKRWNPEIQYTSNYYKSNNVEFAVNTEGVYSEPRPIGTRYLTRNL

SEQ ID NO: 8 - protein, 743 aa, Artificial Sequence
  source: /note="Description of Artificial Sequence: Synthetic polypeptide"
MAADGYLPDWLEDNLSEGIREWWALKPGAPQPKANQQHQDNARGLVLPGYKYLGPGNGLDKGEPVNAADAAALEHDKAYDQQLKAGDNPYLKYNHADAEFQERLKEDTSFGGNLGRAVFQAKKRLLEPLGLVEEAAKTAPGKKRPVEQSPQEPDSSAGIGKSGAQPAKKRLNFGQTGDTESVPDPQPIGEPPAAPSGVGSLTMASGGGAPVADNNEGADGVGSSSGNWHCDSQWLGDRVITTSTRTWALPTYNNHLYKQISNSTSGGSSNDNAYFGYSTPWGYFDFNRFHCHFSPRDWQRLINNNWGFRPKRLNFKLFNIQVKEVTDNNGVKTIANNLTSTVQVFTDSDYQLPYVLGSAHEGCLPPFPADVFMIPQYGYLTLNDGSQAVGRSSFYCLEYFPSQMLRTGNNFQFSYEFENVPFHSSYAHSQSLDRLMNPLIDQYLYYLSRTIILGTGTSQTLKFSVAGPSNMAVQGRNYIPGPSYRQQRVSTTVTQNNNSEFAWPGASSWALNGRNSLMNPGPAMASHKEGEDRFFPLSGSLIFGKQGTGRDNVDADKVMITNEEEIKTTNPVATESYGQVATNHQSAQTRTNPEAAQAQTGWVQNQGILPGMVWQDRDVYLQGPIWAKIPHTDGNFHPSPLMGGFGMKHPPPQILIKNTPVPADPPTAFNKDKLNSFITQYSTGQVSVEIEWELQKENSKRWNPEIQYTSNYYKSNNVEFAVNTEGVYSEPRPIGTRYLTRNL

SEQ ID NO: 9 - protein, 743 aa, Artificial Sequence
  source: /note="Description of Artificial Sequence: Synthetic polypeptide"
MAADGYLPDWLEDNLSEGIREWWALKPGAPQPKANQQHQDNARGLVLPGYKYLGPGNGLDKGEPVNAADAAALEHDKAYDQQLKAGDNPYLKYNHADAEFQERLKEDTSFGGNLGRAVFQAKKRLLEPLGLVEEAAKTAPGKKRPVEQSPQEPDSSAGIGKSGAQPAKKRLNFGQTGDTESVPDPQPIGEPPAAPSGVGSLTMASGGGAPVADNNEGADGVGSSSGNWHCDSQWLGDRVITTSTRTWALPTYNNHLYKQISNSTSGGSSNDNAYFGYSTPWGYFDFNRFHCHFSPRDWQRLINNNWGFRPKRLNFKLFNIQVKEVTDNNGVKTIANNLTSTVQVFTDSDYQLPYVLGSAHEGCLPPFPADVFMIPQYGYLTLNDGSQAVGRSSFYCLEYFPSQMLRTGNNFQFSYEFENVPFHSSYAHSQSLDRLMNPLIDQYLYYLSRTIILGTGTSQTLKFSVAGPSNMAVQGRNYIPGPSYRQQRVSTTVTQNNNSEFAWPGASSWALNGRNSLMNPGPAMASHKEGEDRFFPLSGSLIFGKQGTGRDNVDADKVMITNEEEIKTTNPVATESYGQVATNHQSAQNGGTSSSAQAQTGWVQNQGILPGMVWQDRDVYLQGPIWAKIPHTDGNFHPSPLMGGFGMKHPPPQILIKNTPVPADPPTAFNKDKLNSFITQYSTGQVSVEIEWELQKENSKRWNPEIQYTSNYYKSNNVEFAVNTEGVYSEPRPIGTRYLTRNL

SEQ ID NO: 10 - protein, 743 aa, Artificial Sequence
  source: /note="Description of Artificial Sequence: Synthetic polypeptide"
MAADGYLPDWLEDNLSEGIREWWALKPGAPQPKANQQHQDNARGLVLPGYKYLGPGNGLDKGEPVNAADAAALEHDKAYDQQLKAGDNPYLKYNHADAEFQERLKEDTSFGGNLGRAVFQAKKRLLEPLGLVEEAAKTAPGKKRPVEQSPQEPDSSAGIGKSGAQPAKKRLNFGQTGDTESVPDPQPIGEPPAAPSGVGSLTMASGGGAPVADNNEGADGVGSSSGNWHCDSQWLGDRVITTSTRTWALPTYNNHLYKQISNSTSGGSSNDNAYFGYSTPWGYFDFNRFHCHFSPRDWQRLINNNWGFRPKRLNFKLFNIQVKEVTDNNGVKTIANNLTSTVQVFTDSDYQLPYVLGSAHEGCLPPFPADVFMIPQYGYLTLNDGSQAVGRSSFYCLEYFPSQMLRTGNNFQFSYEFENVPFHSSYAHSQSLDRLMNPLIDQYLYYLSRTINGSGQNQQTLKFSVAGPSNMAVQGRNYIPGPSYRQQRVSTTVTQNNNSEFAWPGASSWALNGRNSLMNPGPAMASHKEGEDRFFPLSGSLIFGKQGTGRDNVDADKVMITNEEEIKTTNPVATESYGQVATNHQSAQQAVRTSLAQAQTGWVQNQGILPGMVWQDRDVYLQGPIWAKIPHTDGNFHPSPLMGGFGMKHPPPQILIKNTPVPADPPTAFNKDKLNSFITQYSTGQVSVEIEWELQKENSKRWNPEIQYTSNYYKSNNVEFAVNTEGVYSEPRPIGTRYLTRNL

SEQ ID NO: 11 - protein, 736 aa, Artificial Sequence
  source: /note="Description of Artificial Sequence: Synthetic polypeptide"
MAADGYLPDWLEDNLSEGIREWWALKPGAPQPKANQQHQDNARGLVLPGYKYLGPGNGLDKGEPVNAADAAALEHDKAYDQQLKAGDNPYLKYNHADAEFQERLKEDTSFGGNLGRAVFQAKKRLLEPLGLVEEAAKTAPGKKRPVEQSPQEPDSSAGIGKSGAQPAKKRLNFGQTGDTESVPDPQPIGEPPAAPSGVGSLTMASGGGAPVADNNEGADGVGSSSGNWHCDSQWLGDRVITTSTRTWALPTYNNHLYKQISNSTSGGSSNDNAYFGYSTPWGYFDFNRFHCHFSPRDWQRLINNNWGFRPKRLNFKLFNIQVKEVTDNNGVKTIANNLTSTVQVFTDSDYQLPYVLGSAHEGCLPPFPADVFMIPQYGYLTLNDGSQAVGRSSFYCLEYFPSQMLRTGNNFQFSYEFENVPFHSSYAHSQSLDRLMNPLIDQYLYYLSRTINGSGQNQQTLKFSVAGPSNMAVQGRNYIPGPSYRQQRVSTTVTQNNNSEFAWPGASSWALNGRNSLMNPGPAMASHKEGEDRFFPLSGSLIFGKQGTGRDNVDADKVMITNEEEIKTTNPVATESYGQVATNHQSAQAQAQTGWVQNQGILPGMVWQDRDVYLQGPIWAKIPHTDGNFHPSPLMGGFGMKHPPPQILIKNTPVPADPPTAFNKDKLNSFITQYSTGQVSVEIEWELQKENSKRWNPEIQYTSNYYKSNNVEFAVNTEGVYSEPRPIGTRYLTRNL

SEQ ID NO: 12 - DNA, 2211 bp, Artificial Sequence
  source: /note="Description of Artificial Sequence: Synthetic polynucleotide"
atggctgccgatggttatcttccagattggctcgaggacaacctctctgagggcattcgcgagtggtgggacttgaaacctggagccccgaagcccaaagccaaccagcaaaagcaggacgacggccggggtctggtgcttcctggctacaagtacctcggacccttcaacggactcgacaagggggagcccgtcaacgcggcggacgcagcggccctcgagcacgacaaggcctacgaccagcagctcaaagcgggtgacaatccgtacctgcggtataaccacgccgacgccgagtttcaggagcgtctgcaagaagatacgtcttttgggggcaacctcgggcgagcagtcttccaggccaagaagcgggttctcgaacctctcggtctggttgaggaaggcgctaagacggctcctggaaagaaacgtccggtagagcagtcgccacaagagccagactcctcctcgggcatcggcaagacaggccagcagcccgctaaaaagagactcaattttggtcagactggcgactcagagtcagtccccgatccacaacctctcggagaacctccagcaacccccgctgctgtgggacctactacaatggcttcaggcggtggcgcaccaatggcagacaataacgaaggcgccgacggagtgggtaatgcctcaggaaattggcattgcgattccacatggctgggcgacagagtcatcaccaccagcacccgcacctgggccttgcccacctacaataaccacctctacaagcaaatctccagtgcttcaacgggggccagcaacgacaaccactacttcggctacagcaccccctgggggtattttgatttcaacagattccactgccacttttcaccacgtgactggcagcgactcatcaacaacaattggggattccggcccaagagactcaacttcaaactcttcaacatccaagtcaaggaggtcacgacgaatgatggcgtcacaaccatcgctaataaccttaccagcacggttcaagtcttctcggactcggagtaccagcttccgtacgtcctcggctctgcgcaccagggctgcctccctccgttcccggcggacgtgttcatgattccgcaatacggctacctgacgctcaacaatggcagccaagccgtgggacgttcatccttttactgcctggaatatttcccttctcagatgctgagaacgggcaacaactttaccttcagctacacctttgaggaagtgcctttccacagcagctacgcgcacagccagagcctggaccggctgatgaatcctctcatcgaccaatacctgtattacctgaacagaactcaaaatcagtccggaagtgcccaaaacaaggacttgctgtttagccgtgggtctccagctggcatgtctgttcagcccaaaaactggctacctggaccctgttatcggcagcagcgcgtttctaaaacaaaaacagacaacaacaacagcaattttacctggactggtgcttcaaaatataacctcaatgggcgtgaatccatcatcaaccctggcactgctatggcctcacacaaagacgacgaagacaagttctttcccatgagcggtgtcatgatttttggaaaagagagcgccggagcttcaaacactgcattggacaatgtcatgattacagacgaagaggaaattaaagccactaaccctgtggccaccgaaagatttgggaccgtggcagtcaatttccagagcagcagcacagaccctgcgaccggagatgtgcatgctatgggagcattacctggcatggtgtggcaagatagagacgtgtacctgcagggtcccatttgggccaaaattcctcacacagatggacactttcacccgtctcctcttatgggcggctttggactcaagaacccgcctcctcagatcctcatcaaaaacacgcctgttcctgcgaatcctccggcggagttttcagctacaaagtttgcttcattcatcacccaatactccacaggacaagtgagtgtggaaattgaatgggagctgcagaaagaaaacagcaagcgctggaatcccgaagtgcagtacacatccaattatgcaaaatctgccaacgttgattttactgtggacaacaatggactttatactgagcctcgccccattggcacccgttaccttacccgtcccctgtaa

SEQ ID NO: 13 - protein, 736 aa, Adeno-associated virus 1
MAADGYLPDWLEDNLSEGIREWWDLKPGAPKPKANQQKQDDGRGLVLPGYKYLGPFNGLDKGEPVNAADAAALEHDKAYDQQLKAGDNPYLRYNHADAEFQERLQEDTSFGGNLGRAVFQAKKRVLEPLGLVEEGAKTAPGKKRPVEQSPQEPDSSSGIGKTGQQPAKKRLNFGQTGDSESVPDPQPLGEPPATPAAVGPTTMASGGGAPMADNNEGADGVGNASGNWHCDSTWLGDRVITTSTRTWALPTYNNHLYKQISSASTGASNDNHYFGYSTPWGYFDFNRFHCHFSPRDWQRLINNNWGFRPKRLNFKLFNIQVKEVTTNDGVTTIANNLTSTVQVFSDSEYQLPYVLGSAHQGCLPPFPADVFMIPQYGYLTLNNGSQAVGRSSFYCLEYFPSQMLRTGNNFTFSYTFEEVPFHSSYAHSQSLDRLMNPLIDQYLYYLNRTQNQSGSAQNKDLLFSRGSPAGMSVQPKNWLPGPCYRQQRVSKTKTDNNNSNFTWTGASKYNLNGRESIINPGTAMASHKDDEDKFFPMSGVMIFGKESAGASNTALDNVMITDEEEIKATNPVATERFGTVAVNFQSSSTDPATGDVHAMGALPGMVWQDRDVYLQGPIWAKIPHTDGHFHPSPLMGGFGLKNPPPQILIKNTPVPANPPAEFSATKFASFITQYSTGQVSVEIEWELQKENSKRWNPEVQYTSNYAKSANVDFTVDNNGLYTEPRPIGTRYLTRPL

SEQ ID NO: 14 - DNA, 4718 bp, Adeno-associated virus 1
ttgcccactccctctctgcgcgctcgctcgctcggtggggcctgcggaccaaaggtccgcagacggcagagctctgctctgccggccccaccgagcgagcgagcgcgcagagagggagtgggcaactccatcactaggggtaatcgcgaagcgcctcccacgctgccgcgtcagcgctgacgtaaattacgtcataggggagtggtcctgtattagctgtcacgtgagtgcttttgcgacattttgcgacaccacgtggccatttagggtatatatggccgagtgagcgagcaggatctccattttgaccgcgaaatttgaacgagcagcagccatgccgggcttctacgagatcgtgatcaaggtgccgagcgacctggacgagcacctgccgggcatttctgactcgtttgtgagctgggtggccgagaaggaatgggagctgcccccggattctgacatggatctgaatctgattgagcaggcacccctgaccgtggccgagaagctgcagcgcgacttcctggtccaatggcgccgcgtgagtaaggccccggaggccctcttctttgttcagttcgagaagggcgagtcctacttccacctccatattctggtggagaccacgggggtcaaatccatggtgctgggccgcttcctgagtcagattagggacaagctggtgcagaccatctaccgcgggatcgagccgaccctgcccaactggttcgcggtgaccaagacgcgtaatggcgccggaggggggaacaaggtggtggacgagtgctacatccccaactacctcctgcccaagactcagcccgagctgcagtgggcgtggactaacatggaggagtatataagcgcctgtttgaacctggccgagcgcaaacggctcgtggcgcagcacctgacccacgtcagccagacccaggagcagaacaaggagaatctgaaccccaattctgacgcgcctgtcatccggtcaaaaacctccgcgcgctacatggagctggtcgggtggctggtggaccggggcatcacctccgagaagcagtggatccaggaggaccaggcctcgtacatctccttcaacgccgcttccaactcgcggtcccagatcaaggccgctctggacaatgccggcaagatcatggcgctgaccaaatccgcgcccgactacctggtaggccccgctccgcccgcggacattaaaaccaaccgcatctaccgcatcctggagctgaacggctacgaacctgcctacgccggctccgtctttctcggctgggcccagaaaaggttcgggaagcgcaacaccatctggctgtttgggccggccaccacgggcaagaccaacatcgcggaagccatcgcccacgccgtgcccttctacggctgcgtcaactggaccaatgagaactttcccttcaatgattgcgtcgacaagatggtgatctggtgggaggagggcaagatgacggccaaggtcgtggagtccgccaaggccattctcggcggcagcaaggtgcgcgtggaccaaaagtgcaagtcgtccgcccagatcgaccccacccccgtgatcgtcacctccaacaccaacatgtgcgccgtgattgacgggaacagcaccaccttcgagcaccagcagccgttgcaggaccggatgttcaaatttgaactcacccgccgtctggagcatgactttggcaaggtgacaaagcaggaagtcaaagagttcttccgctgggcgcaggatcacgtgaccgaggtggcgcatgagttctacgtcagaaagggtggagccaacaaaagacccgcccccgatgacgcggataaaagcgagcccaagcgggcctgcccctcagtcgcggatccatcgacgtcagacgcggaaggagctccggtggactttgccgacaggtaccaaaacaaatgttctcgtcacgcgggcatgcttcagatgctgtttccctgcaagacatgcgagagaatgaatcagaatttcaacatttgcttcacgcacgggacgagagactgttcagagtgcttccccggcgtgtcagaatctcaaccggtcgtcagaaagaggacgtatcggaaactctgtgccattcatcatctgctggggcgggctcccgagattgcttgctcggcctgcgatctggtcaacgtggacctggatgactgtgtttctgagcaataaatgacttaaaccaggtatggctgccgatggttatcttccagattggctcgaggacaacctctctgagggcattcgcgagtggtgggacttgaaacctggagccccgaagcccaaagccaaccagcaaaagcaggacgacggccggggtctggtgcttcctggctacaagtacctcggacccttcaacggactcgacaagggggagcccgtcaacgcggcggacgcagcggccctcgagcacgacaaggcctacgaccagcagctcaaagcgggtgacaatccgtacctgcggtataaccacgccgacgccgagtttcaggagcgtctgcaagaagatacgtcttttgggggcaacctcgggcgagcagtcttccaggccaagaagcgggttctcgaacctctcggtctggttgaggaaggcgctaagacggctcctggaaagaaacgtccggtagagcagtcgccacaagagccagactcctcctcgggcatcggcaagacaggccagcagcccgctaaaaagagactcaattttggtcagactggcgactcagagtcagtccccgatccacaacctctcggagaacctccagcaacccccgctgctgtgggacctactacaatggcttcaggcggtggcgcaccaatggcagacaataacgaaggcgccgacggagtgggtaatgcctcaggaaattggcattgcgattccacatggctgggcgacagagtcatcaccaccagcacccgcacctgggccttgcccacctacaataaccacctctacaagcaaatctccagtgcttcaacgggggccagcaacgacaaccactacttcggctacagcaccccctgggggtattttgatttcaacagattccactgccacttttcaccacgtgactggcagcgactcatcaacaacaattggggattccggcccaagagactcaacttcaaactcttcaacatccaagtcaaggaggtcacgacgaatgatggcgtcacaaccatcgctaataaccttaccagcacggttcaagtcttctcggactcggagtaccagcttccgtacgtcctcggctctgcgcaccagggctgcctccctccgttcccggcggacgtgttcatgattccgcaatacggctacctgacgctcaacaatggcagccaagccgtgggacgttcatccttttactgcctggaatatttcccttctcagatgctgagaacgggcaacaactttaccttcagctacacctttgaggaagtgcctttccacagcagctacgcgcacagccagagcctggaccggctgatgaatcctctcatcgaccaatacctgtattacctgaacagaactcaaaatcagtccggaagtgcccaaaacaaggacttgctgtttagccgtgggtctccagctggcatgtctgttcagcccaaaaactggctacctggaccctgttatcggcagcagcgcgtttctaaaacaaaaacagacaacaacaacagcaattttacctggactggtgcttcaaaatataacctcaatgggcgtgaatccatcatcaaccctggcactgctatggcctcacacaaagacgacgaagacaagttctttcccatgagcggtgtcatgatttttggaaaagagagcgccggagcttcaaacactgcattggacaatgtcatgattacagacgaagaggaaattaaagccactaaccctgtggccaccgaaagatttgggaccgtggcagtcaatttccagagcagcagcacagaccctgcgaccggagatgtgcatgctatgggagcattacctggcatggtgtggcaagatagagacgtgtacctgcagggtcccatttgggccaaaattcctcacacagatggacactttcacccgtctcctcttatgggcggctttggactcaagaacccgcctcctcagatcctcatcaaaaacacgcctgttcctgcgaatcctccggcggagttttcagctacaaagtttgcttcattcatcacccaatactccacaggacaagtgagtgtggaaattgaatgggagctgcagaaagaaaacagcaagcgctggaatcccgaagtgcagtacacatccaattatgcaaaatctgccaacgttgattttactgtggacaacaatggactttatactgagcctcgccccattggcacccgttaccttacccgtcccctgtaattacgtgttaatcaataaaccggttgattcgtttcagttgaactttggtctcctgtccttcttatcttatcggttaccatggttatagcttacacattaactgcttggttgcgcttcgcgataaaagacttacgtcatcgggttacccctagtgatggagttgcccactccctctctgcgcgctcgctcgctcggtggggcctgcggaccaaaggtccgcagacggcagagctctgctctgccggccccaccgagcgagcgagcgcgcagagagggagtgggcaa

SEQ ID NO: 15 - DNA, 3131 bp, Artificial Sequence
  source: /note="Description of Artificial Sequence: Synthetic polynucleotide"
gcggccgcgaattcgcccttggctgcgtcaactggaccaatgagaactttcccttcaatgattgcgtcgacaagatggtgatctggtgggaggagggcaagatgacggccaaggtcgtggagtccgccaaggccattctcggcggcagcaaggtgcgcgtggaccaaaagtgcaagtcgtccgcccagatcgaccccacccccgtgatcgtcacctccaacaccaacatgtgcgccgtgattgacgggaacagcaccaccttcgagcaccagcagcctctccaggaccggatgtttaagttcgaactcacccgccgtctggagcacgactttggcaaggtgacaaagcaggaagtcaaagagttcttccgctgggccagtgatcacgtgaccgaggtggcgcatgagttttacgtcagaaagggcggagccagcaaaagacccgcccccgatgacgcggataaaagcgagcccaagcgggcctgcccctcagtcgcggatccatcgacgtcagacgcggaaggagctccggtggactttgccgacaggtaccaaaacaaatgttctcgtcacgcgggcatgcttcagatgctgtttccctgcaaaacgtgcgagagaatgaatcggaatttcaacatttgcttcacacacggggtcagagactgctcagagtgtttccccggcgtgtcagaatctcaaccggtcgtcagaaagaggacgtatcggaaactccgtgcgattcatcatctgctggggcgggctcccgagattgcttgctcggcctgcgatctggtcaacgtggacctggatgactgtgtttctgagcaataaatgacttaaaccaggtatggctgccgatggttatcttccagattggctcgaggacaacctctctgagggcattcgcgagtggtgggcgctgaaacctggagccccgaagcccaaagccaaccagcaaaagcaggacgacggccggggtctggtgcttcctggctacaagtacctcggacccttcaacggactcgacaagggggagcccgtcaacgcggcggacgcagcggccctcgagcacgacaaggcttacgaccagcagctgcaggcgggtgacaatccgtacctgcggtataaccacgccgacgccgagtttcaggagcgtctgcaagaagatacgtcttttgggggcaacctcgggcgagcagtcttccaggccaagaagcgggttctcgaacctctcggtctggttgaggaaggcgctaagacggctcctggaaagaagagaccggtagagccatcaccccagcgttctccagactcctctacgggcatcggcaagaaaggccaacagcccgccagaaaaagactcaattttggtcagactggcgactcagagtcagttccagaccctcaacctctcggagaacctccagcagcgccctctggtgtgggacctaatacaatggctgcaggcggtggcgcaccaatggcagacaataacgaaggcgccgacggagtgggtagttcctcgggaaattggcattgcgattccacatggctgggcgacagagtcatcaccaccagcacccgaacctgggccctgcccacctacaacaaccacctctacaagcaaatctccaacgggacatcgggaggagccaccaacgacaacacctacttcggctacagcaccccctgggggtattttgactttaacagattccactgccacctttcaccacgtgactggcagcgactcatcaacaacaactggggattccgacccaagagactcagcttcaagctcttcaacatccaggtcaaggaggtcacgcagaatgaaggcaccaagaccatcgccaataacctcaccagcaccatccaggtgtttacggactcggagtaccagctgccgtacgttctcggctctgtccaccagggctgcctgcctccgttcccggcggacgtgttcatgattccccagtacggctacctaacactcaacaacggtagtcaggccgtgggacgctcctccttctactgcctggaatactttccttcgcagatgctgagaaccggcaacaacttccagtttacttacaccttcgaggacgtgcctttccacagcagctacgcccacagctagagcttggaccggctgatgaatcctctgattgaccagtacctgtactacttgtctcggactcaaacaacaggaggcacggcaaatacgcagactctgggcttcagccaaggtgggcctaatacaatggccaatcaggcaaagaactggctgccaggaccctgttaccgccaacaacgcgtctcaacgacaaccgggcaaaacaacaatagcaactttgcctggactgctgggaccaaataccatctgaatggaagaaattcattggctaatcctggcatcgctatggcaacacacaaagacgacgaggagcgtttttttcccagtaacgggatcctgatttttggcaaacaaaatgctgccagagacaatgcggattacagcgatgtcatgctcaccagcgaggaagaaatcaaaaccactaaccctgtggctacagaggaatacggtatcgtggcagataacttgcagcagcaaaacacggctcctcaaattggaactgtcaacagccagggggccttacccggtatggtctggcagaaccgggacgtgtacctgcagggtcccatctgggccaagattcctcacacggacggcaacttccacccgtctccgctgatgggcggctttggcctgaaacatcctccgcctcagatcctgatcaagaacacgcctgtacctgcggatcctccgaccaccttcaaccagtcaaagctgaactctttcatcacgcaatacagcaccggacaggtcagcgtggaaattgaatgggagctgcagaaggaaaacagcaagcgctggaaccccgagatccagtacacctccaactactacaaatctataagtgtggactttgctgttaatacagaaggcgtgtactctgaaccccgccccattggcacccgttacctcacccgtaatctgtaattgcctgttaatcaataaaccggttgattcgtttcagttgaactttggtctctgcgaagggcgaattc

SEQ ID NO: 16 - DNA, 255 bp, Adeno-associated virus 10
ggtaattcctccggaaattggcattgcgattccacatggctgggcgacagagtcatcaccaccagcacccgaacctgggtcctgcccacctacaacaaccacatctacaagcaaatctccagcgagacaggagccaccaacgacaaccactacttcggctacagcaccccctgggggtattttgactttaacagattccactgccacttttcaccacgtgactggcagcgactcatcaacaacaactggggattc

SEQ ID NO: 17 - protein, 738 aa, Adeno-associated virus 10
MAADGYLPDWLEDNLSEGIREWWDLKPGAPKPKANQQKQDDGRGLVLPGYKYLGPFNGLDKGEPVNAADAAALEHDKAYDQQLKAGDNPYLRYNHADAEFQERLQEDTSFGGNLGRAVFQAKKRVLEPLGLVEEAAKTAPGKKRPVEPSPQRSPDSSTGIGKKGQQPAKKRLNFGQTGESESVPDPQPIGEPPAGPSGLGSGTMAAGGGAPMADNNEGADGVGSSSGNWHCDSTWLGDRVITTSTRTWALPTYNNHLYKQISNGTSGGSTNDNTYFGYSTPWGYFDFNRFHCHFSPRDWQRLINNNWGFRPKRLSFKLFNIQVKEVTQNEGTKTIANNLTSTIQVFTDSEYQLPYVLGSAHQGCLPPFPADVFMIPQYGYLTLNNGSQAVGRSSFYCLEYFPSQMLRTGNNFEFSYTFEDVPFHSSYAHSQSLDRLMNPLIDQYLYYLSRTQSTGGTQGTQQLLFSQAGPANMSAQAKNWLPGPCYRQQRVSTTLSQNNNSNFAWTGATKYHLNGRDSLVNPGVAMATHKDDEERFFPSSGVLMFGKQGAGRDNVDYSSVMLTSEEEIKTTNPVATEQYGVVADNLQQANTGPIVGNVNSQGALPGMVWQNRDVYLQGPIWAKIPHTDGNFHPSPLMGGFGLKHPPPQILIKNTPVPADPPTTFSQAKLASFITQYSTGQVSVEIEWELQKENSKRWNPEIQYTSNYYKSTNVDFAVNTEGTYSEPRPIGTRYLTRNL

SEQ ID NO: 18 - protein, 738 aa, Adeno-associated virus 10
MAADGYLPDWLEDNLSEGIREWWDLKPGAPKPKANQQKQDDGRGLVLPGYKYLGPFNGLDKGEPVNAADAAALEHDKAYDQQLKAGDNPYLRYNHADAEFQERLQEDTSFGGNLGRAVFQAKKRVLEPLGLVEEGAKTAPGKKRPVEPSPQRSPDSSTGIGKKGQQPAKKRLNFGQTGDSESVPDPQPIGEPPAGPSGLGSGTMAAGGGAPMADNNEGADGVGSSSGNWHCDSTWLGDRVITTSTRTWALPTYNNHLYKQISNGTSGGSTNDNTYFGYSTPWGYFDFNRFHCHFSPRDWQRLINNNWGFRPKRLNFKLFNIQVKEVTQNEGTKTIANNLTSTIQVFTDSEYQLPYVLGSAHQGCLPPFPADVFMIPQYGYLTLNNGSQAVGRSSFYCLEYFPSQMLRTGNNFEFSYQFEDVPFHSSYAHSQSLDRLMNPLIDQYLYYLSRTQSTGGTAGTQQLLFSQAGPNNMSAQAKNWLPGPCYRQQRVSTTLSQNNNSNFAWTGATKYHLNGRDSLVNPGVAMATHKDDEERFFPSSGVLMFGKQGAGKDNVDYSSVMLTSEEEIKTTNPVATEQYGVVADNLQQQNAAPIVGAVNSQGALPGMVWQNRDVYLQGPIWAKIPHTDGNFHPSPLMGGFGLKHPPPQILIKNTPVPADPPTTFSQAKLASFITQYSTGQVSVEIEWELQKENSKRWNPEIQYTSNYYKSTNVDFAVNTDGTYSEPRPIGTRYLTRNL

SEQ ID NO: 19 - DNA, 258 bp, Adeno-associated virus 11
ggtaattcctccggaaattggcattgcgattccacatggctgggcgacagagtcatcaccaccagcacccgaacctgggccctgccaacctacaacaaccacctctacaaacaaatctccagcgcttcaacgggggccagcaacgacaaccactactttggctacagcaccccctgggggtattttgactttaacagattccactgccacttctcaccacgtgactggcagcgactcatcaacaacaactggggattc

SEQ ID NO: 20 - DNA, 255 bp, Adeno-associated virus 12
ggtaattcctccggaaattggcattgcgattccacatggctgggcgaccgagtcattaccaccagcacccggacttgggccctgcccacctacaacaaccacctctacaagcaaatctccagccaatcgggtgccaccaacgacaaccactacttcggctacagcaccccttgggggtattttgatttcaacagattccactgccatttctcaccacgtgactggcagcgactcatcaacaacaactggggattc

SEQ ID NO: 21 - DNA, 2208 bp, Adeno-associated virus 2
atggctgccgatggttatcttccagattggctcgaggacactctctctgaaggaataagacagtggtggaagctcaaacctggcccaccaccaccaaagcccgcagagcggcataaggacgacagcaggggtcttgtgcttcctgggtacaagtacctcggacccttcaacggactcgacaagggagagccggtcaacgaggcagacgccgcggccctcgagcacgacaaagcctacgaccggcagctcgacagcggagacaacccgtacctcaagtacaaccacgccgacgcggagtttcaggagcgccttaaagaagatacgtcttttgggggcaacctcggacgagcagtcttccaggcgaaaaagagggttcttgaacctctgggcctggttgaggaacctgttaagacggctccgggaaaaaagaggccggtagagcactctcctgtggagccagactcctcctcgggaaccggaaaggcgggccagcagcctgcaagaaaaagattgaattttggtcagactggagacgcagactcagtacctgacccccagcctctcggacagccaccagcagccccctctggtctgggaactaatacgatggctacaggcagtggcgcaccaatggcagacaataacgagggcgccgacggagtgggtaattcctcgggaaattggcattgcgattccacatggatgggcgacagagtcatcaccaccagcacccgaacctgggccctgcccacctacaacaaccacctctacaaacaaatttccagccaatcaggagcctcgaacgacaatcactactttggctacagcaccccttgggggtattttgacttcaacagattccactgccacttttcaccacgtgactggcaaagactcatcaacaacaactggggattccgacccaagagactcaacttcaagctctttaacattcaagtcaaagaggtcacgcagaatgacggtacgacgacgattgccaataaccttaccagcacggttcaggtgtttactgactcggagtaccagctcccgtacgtcctcggctcggcgcatcaaggatgcctcccgccgttcccagcagacgtcttcatggtgccacagtatggatacctcaccctgaacaacgggagtcaggcagtaggacgctcttcattttactgcctggagtactttccttctcagatgctgcgtaccggaaacaactttaccttcagctacacttttgaggacgttcctttccacagcagctacgctcacagccagagtctggaccgtctcatgaatcctctcatcgaccagtacctgtattacttgagcagaacaaacactccaagtggaaccaccacgcagtcaaggcttcagttttctcaggccggagcgagtgacattcgggaccagtctaggaactggcttcctggaccctgttaccgccagcagcgagtatcaaagacatctgcggataacaacaacagtgaatactcgtggactggagctaccaagtaccacctcaatggcagagactctctggtgaatccgggcccggccatggcaagccacaaggacgatgaagaaaagttttttcctcagagcggggttctcatctttgggaagcaaggctcagagaaaacaaatgtggacattgaaaaggtcatgattacagacgaagaggaaatcaggacaaccaatcccgtggctacggagcagtatggttctgtatctaccaacctccagagaggcaacagacaagcagctaccgcagatgtcaacacacaaggcgttcttccaggcatggtctggcaggacagagatgtgtaccttcaggggcccatctgggcaaagattccacacacggacggacattttcacccctctcccctcatgggtggattcggacttaaacaccctcctccacagattctcatcaagaacaccccggtacctgcgaatccttcgaccaccttcagtgcggcaaagtttgcttccttcatcacacagtactccacgggacaggtcagcgtggagatcgagtgggagctgcagaaggaaaacagcaaacgctggaatcccgaaattcagtacacttccaactacaacaagtctgttaatgtggactttactgtggacactaatggcgtgtattcagagcctcgccccattggcaccagatacctgactcgtaatctgtaa

SEQ ID NO: 22 - protein, 735 aa, Adeno-associated virus 2 [sequence omitted]

SEQ ID NO: 23 - protein, 621 aa, Adeno-associated virus 2
MPGFYEIVIKVPSDLDGHLPGISDSFVNWVAEKEWELPPDSDMDLNLIEQAPLTVAEKLQRDFLTEWRRVSKAPEALFFVQFEKGESYFHMHVLVETTGVKSMVLGRFLSQIREKLIQRIYRGIEPTLPNWFAVTKTRNGAGGGNKVVDECYIPNYLLPKTQPELQWAWTNMEQYLSACLNLTERKRLVAQHLTHVSQTQEQNKENQNPNSDAPVIRSKTSARYMELVGWLVDKGITSEKQWIQEDQASYISFNAASNSRSQIKAALDNAGKIMSLTKTAPDYLVGQQPVEDISSNRIYKILELNGYDPQYAASVFLGWATKKFGKRNTIWLFGPATTGKTNIAEAIAHTVPFYGCVNWTNENFPFNDCVDKMVIWWEEGKMTAKVVESAKAILGGSKVRVDQKCKSSAQIDPTPVIVTSNTNMCAVIDGNSTTFEHQQPLQDRMFKFELTRRLDHDFGKVTKQEVKDFFRWAKDHVVEVEHEFYVKKGGAKKRPAPSDADISEPKRVRESVAQPSTSDAEASINYADRYQNKCSRHVGMNLMLFPCRQCERMNQNSNICFTHGQKDCLECFPVSESQPVSVVKKAYQKLCYIHHIMGKVPDACTACDLVNVDLDDCIFEQ

SEQ ID NO: 24 - DNA, 4675 bp, Adeno-associated virus 2
ttggccactccctctctgcgcgctcgctcgctcactgaggccgggcgaccaaaggtcgcccgacgcccgggctttgcccgggcggcctcagtgagcgagcgagcgcgcagagagggagtggccaactccatcactaggggttcctggaggggtggagtcgtgacgtgaattacgtcatagggttagggaggtcctgtattagaggtcacgtgagtgttttgcgacattttgcgacaccatgtggtcacgctgggtatttaagcccgagtgagcacgcagggtctccattttgaagcgggaggtttgaacgcgcagccgccatgccggggttttacgagattgtgattaaggtccccagcgaccttgacgggcatctgcccggcatttctgacagctttgtgaactgggtggccgagaaggaatgggagttgccgccagattctgacatggatctgaatctgattgagcaggcacccctgaccgtggccgagaagctgcagcgcgactttctgacggaatggcgccgtgtgagtaaggccccggaggcccttttctttgtgcaatttgagaagggagagagctacttccacatgcacgtgctcgtggaaaccaccggggtgaaatccatggttttgggacgtttcctgagtcagattcgcgaaaaactgattcagagaatttaccgcgggatcgagccgactttgccaaactggttcgcggtcacaaagaccagaaatggcgccggaggcgggaacaaggtggtggatgagtgctacatccccaattacttgctccccaaaacccagcctgagctccagtgggcgtggactaatatggaacagtatttaagcgcctgtttgaatctcacggagcgtaaacggttggtggcgcagcatctgacgcacgtgtcgcagacgcaggagcagaacaaagagaatcagaatcccaattctgatgcgccggtgatcagatcaaaaacttcagccaggtacatggagctggtcgggtggctcgtggacaaggggattacctcggagaagcagtggatccaggaggaccaggcctcatacatctccttcaatgcggcctccaactcgcggtcccaaatcaaggctgccttggacaatgcgggaaagattatgagcctgactaaaaccgcccccgactacctggtgggccagcagcccgtggaggacatttccagcaatcggatttataaaattttggaactaaacgggtacgatccccaatatgcggcttccgtctttctgggatgggccacgaaaaagttcggcaagaggaacaccatctggctgtttgggcctgcaactaccgggaagaccaacatcgcggaggccatagcccacactgtgcccttctacgggtgcgtaaactggaccaatgagaactttcccttcaacgactgtgtcgacaagatggtgatctggtgggaggaggggaagatgaccgccaaggtcgtggagtcggccaaagccattctcggaggaagcaaggtgcgcgtggaccagaaatgcaagtcctcggcccagatagacccgactcccgtgatcgtcacctccaacaccaacatgtgcgccgtgattgacgggaactcaacgaccttcgaacaccagcagccgttgcaagaccggatgttcaaatttgaactcacccgccgtctggatcatgactttgggaaggtcaccaagcaggaagtcaaagactttttccggtgggcaaaggatcacgtggttgaggtggagcatgaattctacgtcaaaaagggtggagccaagaaaagacccgcccccagtgacgcagatataagtgagcccaaacgggtgcgcgagtcagttgcgcagccatcgacgtcagacgcggaagcttcgatcaactacgcagacaggtaccaaaacaaatgttctcgtcacgtgggcatgaatctgatgctgtttccctgcagacaatgcgagagaatgaatcagaattcaaatatctgcttcactcacggacagaaagactgtttagagtgctttcccgtgtcagaatctcaacccgtttctgtcgtcaaaaaggcgtatcagaaactgtgctacattcatcatatcatgggaaaggtgccagacgcttgcactgcctgcgatctggtcaatgtggatttggatgactgcatctttgaacaataaatgatttaaatcaggtatggctgccgatggttatcttccagattggctcgaggacactctctctgaaggaataagacagtggtggaagctcaaacctggcccaccaccaccaaagcccgcagagcggcataaggacgacagcaggggtcttgtgcttcctgggtacaagtacctcggacccttcaacggactcgacaagggagagccggtcaacgaggcagacgccgcggccctcgagcacgtacaaagcctacgaccggcagctcgacagcggagacaacccgtacctcaagtacaaccacgccgacgcggagtttcaggagcgccttaaagaagatacgtcttttgggggcaacctcggacgagcagtcttccaggcgaaaaagagggttcttgaacctctgggcctggttgaggaacctgttaagacggctccgggaaaaaagaggccggtagagcactctcctgtggagccagactcctcctcgggaaccggaaaggcgggccagcagcctgcaagaaaaagattgaattttggtcagactggagacgcagactcagtacctgacccccagcctctcggacagccaccagcagccccctctggtctgggaactaatacgatggctacaggcagtggcgcaccaatggcagacaataacgagggcgccgacggagtgggtaattcctccggaaattggcattgcgattccacatggatgggcgacagagtcatcaccaccagcacccgaacctgggccctgcccacctacaacaaccacctctacaaacaaatttccagccaatcaggagcctcgaacgacaatcactactttggctacagcaccccttgggggtattttgacttcaacagattccactgccacttttcaccacgtgactggcaaagactcatcaacaacaactggggattccgacccaagagactcaacttcaagctctttaacattcaagtcaaagaggtcacgcagaatgacggtacgacgacgattgccaataaccttaccagcacggttcaggtgtttactgactcggagtaccagctcccgtacgtcctcggctcggcgcatcaaggatgcctcccgccgttcccagcagacgtcttcatggtgccacagtatggatacctcaccctgaacaacgggagtcaggcagtaggacgctcttcattttactgcctggagtactttccttctcagatgctgcgtaccggaaacaactttaccttcagctacacttttgaggacgttcctttccacagcagctacgctcacagccagagtctggaccgtctcatgaatcctctcatcgaccagtacctgtattacttgagcagaacaaacactccaagtggaaccaccacgcagtcaaggcttcagttttctcaggccggagcgagtgacattcgggaccagtctaggaactggcttcctggaccctgttaccgccagcagcgagtatcaaagacatctgcggataacaacaacagtgaatactcgtggactggagctaccaagtaccacctcaatggcagagactctctggtgaatccggccatggcaagccacaaggacgatgaagaaaagttttttcctcagagcggggttctcatctttgggaagcaaggctcagagaaaacaaatgtgaacattgaaaaggtcatgattacagacgaagaggaaatcggaacaaccaatcccgtggctacggagcagtatggttctgtatctaccaacctccagagaggcaacagacaagcagctaccgcagatgtcaacacacaaggcgttcttccaggcatggtctggcaggacagagatgtgtaccttcaggggcccatctgggcaaagattccacacacggacggacattttcacccctctcccctcatgggtggattcggacttaaacaccctcctccacagattctcatcaagaacaccccggtacctgcgaatccttcgaccaccttcagtgcggcaaagtttgcttccttcatcacacagtactccacgggacacggtcagcgtggagatcgagtgggagctgcagaaggaaaacagcaaacgctggaatcccgaaattcagtacacttccaactacaacaagtctgttaatcgtggacttaccgtggatactaatggcgtgtattcagagcctcgccccattggcaccagatacctgactcgtaatctgtaattgcttgttaatcaataaaccgtttaattcgtttcagttgaactttggtctctgcgtatttctttcttatctagtttccatggctacgtagataagtagcatggcgggttaatcattaactacaaggaacccctagtgatggagttggccactccctctctgcgcgctcgctcgctcactgaggccgggcgaccaaaggtcgcccgacgcccgggctttgcccgggcggcctcagtgagcgagcgagcgcgcagagagggagtggccaa

SEQ ID NO: 25 - DNA, 4679 bp, Adeno-associated virus 2
ttggccactccctctctgcgcgctcgctcgctcactgaggccgggcgaccaaaggtcgcccgacgcccgggctttgcccgggcggcctcagtgagcgagcgagcgcgcagagagggagtggccaactccatcactaggggttcctggaggggtggagtcgtgacgtgaattacgtcatagggttagggaggtcctgtattagaggtcacgtgagtgttttgcgacattttgcgacaccatgtggtcacgctgggtatttaagcccgagtgagcacgcagggtctccattttgaagcgggaggtttgaacgcgcagccgccatgccggggttttacgagattgtgattaaggtccccagcgaccttgacgggcatctgcccggcatttctgacagctttgtgaactgggtggccgagaaggaatgggagttgccgccagattctgacatggatctgaatctgattgagcaggcacccctgaccgtggccgagaagctgcagcgcgactttctgacggaatggcgccgtgtgagtaaggccccggaggcccttttctttgtgcaatttgagaagggagagagctacttccacatgcacgtgctcgtggaaaccaccggggtgaaatccatggttttgggacgtttcctgagtcagattcgcgaaaaactgattcagagaatttaccgcgggatcgagccgactttgccaaactggttcgcggtcacaaagaccagaaatggcgccggaggcgggaacaaggtggtggatgagtgctacatccccaattacttgctccccaaaacccagcctgagctccagtgggcgtggactaatatggaacagtatttaagcgcctgtttgaatctcacggagcgtaaacggttggtggcgcagcatctgacgcacgtgtcgcagacgcaggagcagaacaaagagaatcagaatcccaattctgatgcgccggtgatcagatcaaaaacttcagccaggtacatggagctggtcgggtggctcgtggacaaggggattacctcggagaagcagtggatccaggaggaccaggcctcatacatctccttcaatgcggcctccaactcgcggtcccaaatcaaggctgccttggacaatgcgggaaagattatgagcctgactaaaaccgcccccgactacctggtgggccagcagcccgtggaggacatttccagcaatcggatttataaaattttggaactaaacgggtacgatccccaatatgcggcttccgtctttctgggatgggccacgaaaaagttcggcaagaggaacaccatctggctgtttgggcctgcaactaccgggaagaccaacatcgcggaggccatagcccacactgtgcccttctacgggtgcgtaaactggaccaatgagaactttcccttcaacgactgtgtcgacaagatggtgatctggtgggaggaggggaagatgaccgccaaggtcgtggagtcggccaaagccattctcggaggaagcaaggtgcgcgtggaccagaaatgcaagtcctcggcccagatagacccgactcccgtgatcgtcacctccaacaccaacatgtgcgccgtgattgacgggaactcaacgaccttcgaacaccagcagccgttgcaagaccggatgttcaaatttgaactcacccgccgtctggatcatgactttgggaaggtcaccaagcaggaagtcaaagactttttccggtgggcaaaggatcacgtggttgaggtggagcatgaattctacgtcaaaaagggtggagccaagaaaagacccgcccccagtgacgcagatataagtgagcccaaacgggtgcgcgagtcagttgcgcagccatcgacgtcagacgcggaagcttcgatcaactacgcagacaggtaccaaaacaaatgttctcgtcacgtgggcatgaatctgatgctgtttccctgcagacaatgcgagagaatgaatcagaattcaaatatctgcttcactcacggacagaaagactgtttagagtgctttcccgtgtcagaatctcaacccgtttctgtcgtcaaaaaggcgtatcagaaactgtgctacattcatcatatcatgggaaaggtgccagacgcttgcactgcctgcgatctggtcaatgtggatttggatgactgcatctttgaacaataaatgatttaaatcaggtatggctgccgatggttatcttccagattggctcgaggacactctctctgaaggaataagacagtggtggaagctcaaacctggcccaccaccaccaaagcccgcagagcggcataaggacgacagcaggggtcttgtgcttcctgggtacaagtacctcggacccttcaacggactcgacaagggagagccggtcaacgaggcagacgccgcggccctcgagcacgacaaagcctacgaccggcagctcgacagcggagacaacccgtacctcaagtacaaccacgccgacgcggagtttcaggagcgccttaaagaagatacgtcttttgggggcaacctcggacgagcagtcttccaggcgaaaaagagggttcttgaacctctgggcctggttgaggaacctgttaagacggctccgggaaaaaagaggccggtagagcactctcctgtggagccagactcctcctcgggaaccggaaaggcgggccagcagcctgcaagaaaaagattgaattttggtcagactggagacgcagactcagtacctgacccccagcctctcggacagccaccagcagccccctctggtctgggaactaatacgatggctacaggcagtggcgcaccaatggcagacaataacgagggcgccgacggagtgggtaattcctccggaaattggcattgcgattccacatggatgggcgacagagtcatcaccaccagcacccgaacctgggccctgcccacctacaacaaccacctctacaaacaaatttccagccaatcaggagcctcgaacgacaatcactactttggctacagcaccccttgggggtattttgacttcaacagattccactgccacttttcaccacgtgactggcaaagactcatcaacaacaactggggattccgacccaagagactcaacttcaagctctttaacattcaagtcaaagaggtcacgcagaatgacggtacgacgacgattgccaataaccttaccagcacggttcaggtgtttactgactcggagtaccagctcccgtacgtcctcggctcggcgcatcaaggatgcctcccgccgttcccagcagacgtcttcatggtgccacagtatggatacctcaccctgaacaacgggagtcaggcagtaggacgctcttcattttactgcctggagtactttccttctcagatgctgcgtaccggaaacaactttaccttcagctacacttttgaggacgttcctttccacagcagctacgctcacagccagagtctggaccgtctcatgaatcctctcatcgaccagtacctgtattacttgagcagaacaaacactccaagtggaaccaccacgcagtcaaggcttcagttttctcaggccggagcgagtgacattcgggaccagtctaggaactggcttcctggaccctgttaccgccagcagcgagtatcaaagacatctgcggataacaacaacagtgaatactcgtggactggagctaccaagtaccacctcaatggcagagactctctggtgaatccgggcccggccatggcaagccacaaggacgatgaagaaaagttttttcctcagagcggggttctcatctttgggaagcaaggctcagagaaaacaaatgtggacattgaaaaggtcatgattacagacgaagaggaaatcaggacaaccaatcccgtggctacggagcagtatggttctgtatctaccaacctccagagaggcaacagacaagcagctaccgcagatgtcaacacacaaggcgttcttccaggcatggtctggcaggacagagatgtgtaccttcaggggcccatctgggcaaagattccacacacggacggacattttcacccctctcccctcatgggtggattcggacttaaacaccctcctccacagattctcatcaagaacaccccggtacctgcgaatccttcgaccaccttcagtgcggcaaagtttgcttccttcatcacacagtactccacgggacaggtcagcgtggagatcgagtgggagctgcagaaggaaaacagcaaacgctggaatcccgaaattcagtacacttccaactacaacaagtctgttaatgtggactttactgtggacactaatggcgtgtattcagagcctcgccccattggcaccagatacctgactcgtaatctgtaattgcttgttaatcaataaaccgtttaattcgtttcagttgaactttggtctctgcgtatttctttcttatctagtttccatggctacgtagataagtagcatggcgggttaatcattaactacaaggaacccctagtgatggagttggccactccctctctgcgcgctcgctcgctcactgaggccgggcgaccaaaggtcgcccgacgcccgggctttgcccgggcggcctcagtgagcgagcgagcgcgcagagagggagtggccaa

SEQ ID NO: 26 - protein, 725 aa, Adeno-associated virus 5
MAADGYLPDWLEDTLSEGIRQWWKLKPGPPPPKPAERHKDDSRGLVLPGYKYLGPFNGLDKGEPVNEADAAALEHDKAYDRQLDSGDNPYLKYNHADAEFQERLKEDTSFGGNLGRAVFQAKKRVLEPFGLVEEGAKTAPTGKRIDDHFPKRKKARTEEDSKPSTSSDAEAGPSGSQQLQIPAQPASSLGADTMSAGGGGPLGDNNQGADGVGNASGDWHCDSTWMGDRVVTKSTRTWVLPSYNNHQYREIKSGSVDGSNANAYFGYSTPWGYFDFNRFHSHWSPRDWQRLINNYWGFRPRSLRVKIFNIQVKEVTVQDSTTTIANNLTSTVQVFTDDDYQLPYVVGNGTEGCLPAFPPQVFTLPQYGYATLNRDNTENPTERSSFFCLEYFPSKMLRTGNNFEFTYNFEEVPFHSSFAPSQNLFKLANPLVDQYLYRFVSTNNTGGVQFNKNLAGRYANTYKNWFPGPMGRTQGWNLGSGVNRASVSAFATTNRMELEGASYQVPPQPNGMTNNLQGSNTYALENTMIFNSQPANPGTTATYLEGNMLITSESETQPVNRVAYNVGGQMATNNQSSTTAPTTGTYNLQEIVPGSVWMERDVYLQGPIWAKIPETGAHFHPSPAMGGFGLKHPPPMMLIKNTPVPGNITSFSDVPVSSFITQYSTGQVTVEMEWELKKENSKRWNPEIQYTNNYNDPQFVDFAPDSTGEYRTTRPIGTRYLTRPL

SEQ ID NO: 27 - protein, 644 aa, Artificial Sequence
  source: /note="Description of Artificial Sequence: Synthetic polypeptide"
  MOD_RES (434)..(434): Any amino acid
KAYDQQLKAGDNPYLRYNHADAEFQERLQEDTSFGGNLGRAVFQAKKRVLEPLGLVETPAKTAPGKKRPVDSPDSTSGIGKKGQQPAKKRLNFGQTGDSESVPDPQPIGEPPAGPSGLGSGTMAAGGGAPMADNNEGADGVGNASGNWHCDSTWLGDRVITTSTRTWALPTYNNHLYKQISSQSAGSTNDNVYFGYSTPWGYFDFNRFHCHFSPRDWQRLINNNWGFRPKKLNFKLFNIQVKEVTTNDGVTTIANNLTSTVQVFSDSEYQLPYVLGSAHQGCLPPFPADVFMIPQYGYLTLNNGSQSVGRSSFYCLEYFPSQMLRTGNNFTFSYTFEDVPFHSSYAHSQSLDRLMNPLIDQYLYYLARTQSNAGGTAGNRELQFYQGGPTTMAEQAKNWLPGPCFRQQRVSKTLDQNNNSNFAWTGATKYHLNXRNSLVNPGVAMATHKDDEERFFPSSGVLIFGKTGAANKTTLENVLMTNEEEIRPTNPVATEEYGIVSSNLQAASTAAQTQVVNNQGALPGMVWQNRDVYLQGPIWAKIPHTDGNFHPSPLMGGFGLKHPPPQILIKNTPVPANPPEVFTPAKFASFITQYSTGQVSVEIEWELQKENSKRWNPEIQYTSNFDKQTGVDFAVDSQGVYSEP

SEQ ID NO: 28 - DNA, 1933 bp, Artificial Sequence
  source: /note="Description of Artificial Sequence: Synthetic polynucleotide"
caaggcctacgaccagcagctcaaagcgggtgacaatccgtacctgcggtataaccacgccgacgccgagtttcaggagtgtcttcaagaagatacgtcttttgggggcaacctcgggcgagcagtcttccaggccaaaaagcgggttctcgaacctcttggtctggttgagacgccagctaagacggcacctggaaagaagcgaccggtagactcgccagactccacctcgggcatcggcaagaaaggccagcagcccgcgaaaaagagactcaactttgggcagactggcgactcagagtcagtccccgaccctcaaccaatcggagaaccaccagcaggcccctctggtctgggatctggtacaatggttgcaggcggtggcgcaccaatggctgacaataacgagggcgccgacggagtgggtaatgcctcaggaaattggcattgcgattccacatggctgggcgacagagtcatcaccaccagcacccgaacctgggccctgcccacctacaacaaccacctctacaagcaaatctccagtcagtcagcagggagcaccaacgataacgtctatttcggctacagcaccccctgggggtattttgacttcaacagattccattgccacttctcaccacgtgactggcagcgacttatcaacaacaactggggattccggcccaagaagctcaacttcaagctcttcaacatccaggtcaaggaggtcacgacgaatgacggtgtcacaaccatcgctaataaccttaccagcacggttcaggtcttttcggactcggaatatcaactgccgtacgtcctcggctccgcgcaccagggctgcctgcctccgttcccggcagacgtgttcatgattccgcagtacggatacctgactctgaacaatggcagccaatcggtaggccgttcctccttctactgcctggagtactttccttctcagatgctgagaacgggcaacaacttcacctttagctacaccttcgaggacgtgcctttccacagcagctacgcgcacagccagagtctggaccggctgatgaatcccctcatcgaccagtacctgtactacttggccagaacacagagcaacgcaggaggtactgctggcaatcgggaactgcagttttatcagggcggacctaccaccatggccgaacaagcaaagaactggctgcccggaccttgcttccggcaacagagagtatccaagacgctggatcaaaataacaacagcaactttgcctggactggtgccacaaaataccatttaaatggaagaaattcattggttaatcccggtgtcgccatggcaacccacaaggacgacgaggaacgcttctccccttcgagcggagttctaatttttggcaaaactggagcagctaataaaactacattagaaaacgtgctcatgacaaatgaagaagaaattcgtcctaccaacccggtagctaccgaggaatacgggattgtaagcagcaacttgcaggcggctagcaccgcagcccagacacaagttgttaacaaccagggagccttacctggcatggtctggcagaaccgggacgtgtacctgcaaggtcccatttgggccaagattcctcacacggacggcaactttcacccgtctcctctaatgggtggctttggactgaaacacccgcctccccagatcctgatcaaaaacacgccggtacctgctaatcctccagaagtgtttactcctgccaagtttgcttccttcatcacgcagtacagcaccgggcaagtcagcgttgagatcgagtgggagctgcagaaagagaacagcaagcgctggaacccagagattcagtacacctccaactttgacaaacagactggagtggactttgctgttgacagccagggtgtttactctgagcct

SEQ ID NO: 29 - protein, 644 aa, Artificial Sequence
  source: /note="Description of Artificial Sequence: Synthetic polypeptide"
KAYDQQLKAGDNPYLRYNHADAEFQECLQEDTSFGGNLGRAVFQAKKRVLEPLGLVETPAKTAPGKKRPVDSPDSTSGIGKKGQQPAKKRLNFGQTGDSESVPDPQPIGEPPAGPSGLGSGTMVAGGGAPMADNNEGADGVGNASGNWHCDSTWLGDRVITTSTRTWALPTYNNHLYKQISSQSAGSTNDNVYFGYSTPWGYFDFNRFHCHFSPRDWQRLINNNWGFRPKKLNFKLFNIQVKEVTTNDGVTTIANNLTSTVQVFSDSEYQLPYVLGSAHQGCLPPFPADVFMIPQYGYLTLNNGSQSVGRSSFYCLEYFPSQMLRTGNNFTFSYTFEDVPFHSSYAHSQSLDRLMNPLIDQYLYYLARTQSNAGGTAGNRELQFYQGGPTTMAEQAKNWLPGPCFRQQRVSKTLDQNNNSNFAWTGATKYHLNGRNSLVNPGVAMATHKDDEERFSPSSGVLIFGKTGAANKTTLENVLMTNEEEIRPTNPVATEEYGIVSSNLQAASTAAQTQVVNNQGALPGMVWQNRDVYLQGPIWAKIPHTDGNFHPSPLMGGFGLKHPPPQILIKNTPVPANPPEVFTPAKFASFITQYSTGQVSVEIEWELQKENSKRWNPEIQYTSNFDKQTGVDFAVDSQGVYSEP

SEQ ID NO: 30 - DNA, 1933 bp, Artificial Sequence
  source: /note="Description of Artificial Sequence: Synthetic polynucleotide"
caaggcctacgaccagcagctcaaagcgggtgacaatccgtacctgcggtataaccacgccgacgccgagtttcaggagcgtcttcaagaagatacgtcttttgggggcaacctcgggcgagcagtcttccaggccaaaaagcgggttctcgaacctcttggtctggttgagacgccagctaagacggcacctggaaagaagcgaccggtagactcgccagactccacctcgggcatcggcaagaaaggccagcagcccgcgaaaaagagactcaactttgggcagactggcgactcagagccagtccccgaccctcaaccaatcggagaaccaccagcaggcccctctggtctgggatctggtacaatggctgcaggcggtggcgcaccaatggctgacaataacgagggcgccgacggagtgggtaatgcctcaggaaattggcattgcgattccacacggctgggcgacagagtcatcaccaccagcacccgaacctgggccctgcccacctacaacaaccacctctacaagcaaatctccagtcagtcagcagggagcaccaacgataacgtctatttcggctacagcaccccctgggggtattttgacttcaacagattccattgccacttctcaccacgtgactggcagcgacttatcaacaacaactggggattccggcccaagaagctcaacttcaagctcttcaacatccaggtcaaggaggtcacgacgaatgacggcgtcacaaccatcgctaataaccttaccagcacggttcaggtcttttcggactcggaatatcaactgccgtacgtcctcggctccgcgcaccagggctgcctgcctccgttcccggcagacgtgttcatgattccgcagtacggatacctgactctgaacaatggcagccaatcggtaggccgttcctccttctactgcctggagtactttccttctcagatgctgagaacgggcaacaacttcacctttagctacaccttcgaggacgtgcctttccacagcagctacgcgcacagccagagtctgggccggctgatgaatcccctcatcgaccagtacctgtactacttggccagaacacagagcaacgcaggaggtactgctggcaatcgggaactgcagttttatcagggcggacctaccaccatggccgaacaagcaaagaactggctgcccggaccttgcttccggcaacagagagtatccaagacgctggatcaaaataacaacagcaactttgcctggactggtgccacaaaataccatttaaatggaagaaattcattggttaatcccggtgtcgccatggcaacccacaaggacgacgaggaacgcttcttcccttcgagcggagttctaatttttggcaaaactggagcagctaataaaactacattagaaaacgtgctcatgacaaatgaagaagaaattcgtcctaccaacccggtagctaccgaggaatacgggattgtaagcagcaacttgcaggcggctagcaccgcagcccagacacaagttgttaacaaccagggagccttacctggcatggtctggcagaaccgggacgtgtacctgcaaggtcccatttgggccaagattcctcacacggacggcaactttcacccgtctcctctaatgggtggctttggactgaaacacccgcctccccagatcctgatcaaaaacacaccggtacctgctaatcctccagaagtgtttactcctgccaagtttgcttccttcatcacgcagtacagcaccgggcaagtcagcgttgagatcgaatgggagctgcagaaagagaacagcaagcgctggaacccagagattcagtacacctccaactttgacaaacagactggagtggactttgctgttgacagccagggtgtttactctgagcct

SEQ ID NO: 31 - protein, 644 aa, Artificial Sequence
  source: /note="Description of Artificial Sequence: Synthetic polypeptide"
KAYDQQLKAGDNPYLRYNHADAEFQERLQEDTSFGGNLGRAVFQAKKRVLEPLGLVETPAKTAPGKKRPVDSPDSTSGIGKKGQQPAKKRLNFGQTGDSEPVPDPQPIGEPPAGPSGLGSGTMAAGGGAPMADNNEGADGVGNASGNWHCDSTRLGDRVITTSTRTWALPTYNNHLYKQISSQSAGSTNDNVYFGYSTPWGYFDFNRFHCHFSPRDWQRLINNNWGFRPKKLNFKLFNIQVKEVTTNDGVTTIANNLTSTVQVFSDSEYQLPYVLGSAHQGCLPPFPADVFMIPQYGYLTLNNGSQSVGRSSFYCLEYFPSQMLRTGNNFTFSYTFEDVPFHSSYAHSQSLGRLMNPLIDQYLYYLARTQSNAGGTAGNRELQFYQGGPTTMAEQAKNWLPGPCFRQQRVSKTLDQNNNSNFAWTGATKYHLNGRNSLVNPGVAMATHKDDEERFFPSSGVLIFGKTGAANKTTLENVLMTNEEEIRPTNPVATEEYGIVSSNLQAASTAAQTQVVNNQGALPGMVWQNRDVYLQGPIWAKIPHTDGNFHPSPLMGGFGLKHPPPQILIKNTPVPANPPEVFTPAKFASFITQYSTGQVSVEIEWELQKENSKRWNPEIQYTSNFDKQTGVDFAVDSQGVYSEP

SEQ ID NO: 32 - DNA, 1933 bp, Artificial Sequence; identical to SEQ ID NO: 30
  source: /note="Description of Artificial Sequence: Synthetic polynucleotide"

SEQ ID NO: 33 - protein, 644 aa, Artificial Sequence; identical to SEQ ID NO: 31
  source: /note="Description of Artificial Sequence: Synthetic polypeptide"

SEQ ID NO: 34 - DNA, 1933 bp, Artificial Sequence
  source: /note="Description of Artificial Sequence: Synthetic polynucleotide"
caaggcctacgaccagcagctcaaagcgggtgacaatccgtacctgcggtataaccacgccgacgccgagtttcaggagcgtcttcaagaagatacgtcttttgggggcaacctcgggcgagcagtcttccaggccaaaaagcgggttctcgaacctcttggtctggttgagacgccagctaagacggcacctggaaagaagcgaccggtagactcgccagactccacctcgggcatcggcaagaaaggccagcagcccgcgaaaaagagactcaactttgggcagactggcgactcagagtcagtccccgaccctcaaccaatcggagaaccaccagcaggcccctctggtctgggatctggtacaatggctgcaggcggtggcgcaccaatggctgacaatagcgagggcgccgacggagtgggtaatgcctcaggaaattggcattgcgattccacatggctgggcgacagagtcatcaccaccagcacccgaacctgggccctgcccacctacaacaaccacctctacaagcaaatctccagtcagtcagcagggagcaccaacgataacgtctatttcggctacagcaccccctgggggtattttgacttcaacagattccattgccacttctcaccacgtgactggcagcgacttatcaacaacaactggggattccggcccaagaagctcaacttcaagctcttcaacatccaggtcaaggaggtcacgacgaatgacggtgtcacaaccatcgctaataaccttaccagcacggttcaggtcttttcggactcggaatatcaactgccgtacgtcctcggctccgcgcaccagggctgcctgcctccgttcccggcagacgtgttcatgattccgcagtacggatacctgactctgaacaatggcagccaatcggtaggccgttcctccttctactgcctggagtactttccttctcagatgctgagaacgggcaacaacttcacctttagctacaccttcgaggacgtgcctttccacagcagctacgcgcacagccagagtctggaccggctgatgaatcccctcatcgaccagtacctgtactacttggccagaacacagagcaacgcaggaggtactgctggcaatcgggaactgcagttttatcagggcggacctaccaccatggccgaacaagcaaagaactggctgcccggaccttgcttccggcaacagagagtatccaagacgctggatcaaaataacaacagcaactttgcctggactggtgccacaaaataccatttaaatggaagaaattcattggttaatcccggtgtcgccatggcaacccacaaggacgacgaggaacgcttcttcccttcgagcggagttctaatttttggcaaaactggagcagctaataaaactacattagaaaacgtgctcatgacaaatgaagaagaaattcgtcctaccaacccggtagctaccgaggaatacgggattgtaagcagcaacttgcaggcggctagcaccgcagcccagacacaagttgttaacaaccagggagccttacctggcatggtctggcagaaccgggacgtgtacctgcaaggtcccatttgggccaagattcctcacacggacggcaactttcacccgtctcctctaatgggtggctttggactgaaacacccgcctccccagatcctgatcaaaaacacaccggtacctgctaatcctccagaagtgtttactcctgccaagcttgcttccttcatcacgcagtacagcaccgggcaagtcagcgttgagatcgagtgggagctgcagaaagagaacagcaagcgctggaacccagagattcagtacacctccaactttgacaaacagactggagtggactttgctgttgacagccagggtgtttactctgagcct

SEQ ID NO: 35 - protein, 644 aa, Artificial Sequence
  source: /note="Description of Artificial Sequence: Synthetic polypeptide"
KAYDQQLKAGDNPYLRYNHADAEFQERLQEDTSFGGNLGRAVFQAKKRVLEPLGLVETPAKTAPGKKRPVDSPDSTSGIGKKGQQPAKKRLNFGQTGDSESVPDPQPIGEPPAGPSGLGSGTMAAGGGAPMADNSEGADGVGNASGNWHCDSTWLGDRVITTSTRTWALPTYNNHLYKQISSQSAGSTNDNVYFGYSTPWGYFDFNRFHCHFSPRDWQRLINNNWGFRPKKLNFKLFNIQVKEVTTNDGVTTIANNLTSTVQVFSDSEYQLPYVLGSAHQGCLPPFPADVFMIPQYGYLTLNNGSQSVGRSSFYCLEYFPSQMLRTGNNFTFSYTFEDVPFHSSYAHSQSLDRLMNPLIDQYLYYLARTQSNAGGTAGNRELQFYQGGPTTMAEQAKNWLPGPCFRQQRVSKTLDQNNNSNFAWTGATKYHLNGRNSLVNPGVAMATHKDDEERFFPSSGVLIFGKTGAANKTTLENVLMTNEEEIRPTNPVATEEYGIVSSNLQAASTAAQTQVVNNQGALPGMVWQNRDVYLQGPIWAKIPHTDGNFHPSPLMGGFGLKHPPPQILIKNTPVPANPPEVFTPAKLASFITQYSTGQVSVEIEWELQKENSKRWNPEIQYTSNFDKQTGVDFAVDSQGVYSEP

SEQ ID NO: 36 - DNA, 1933 bp, Artificial Sequence
  source: /note="Description of Artificial Sequence: Synthetic polynucleotide"
caaggcctacgaccagcagctcaaagcgggtgacaatccgtacctgcggtataaccacgccgacgccgagtttcaggagcgtcttcaagaagatacgtcttttgggggcaacctcgggcgagcagtcttccaggccaaaaagcgggttctcgaacctcttggtctggttgagacgccagctaagacggcacctggaaagaagcgaccggtagactcgccagactccacctcgggcatcggcaagaaaggccagcagcccgcgaaaaagagactcaactttgggcagactggcgactcagagtcagtccccgaccctcaaccaatcggagaaccaccagcaggcccctctggtctgggatctggtacaatggctgcaggcggtggcgcaccaatggctgacaataacgagggcgccgacggagtgggtaatgcctcaggaaattggcattgcgattccacatggctgggcgacagagtcatcaccaccagcacccgaacctgggccctgcccacctacaacaaccacctctacaagcaaatctccagtcagtcagcagggagcaccaacgataacgtctatttcggctacagcaccccctgggggtattttgacttcaacagattccattgccacttctcaccacgtgactggcagcgacttatcaacaacaactggggattccggcccaagaagctcaacttcaagctcttcaacatccaggtcaaggaggtcacgacgaatgacggcgtcacaaccatcgctaataaccttaccagcacggttcaggtcttttcggacccggaatatcaactgccgtacgtcctcggctccgcgcaccagggctgcctgcctccgttcccggcagacgtgttcatgattccgcagtacggatacctgactctgaacaatggcagccaatcggtaggccgttcctccttctactgcctggagtactttccttctcagatgctgagaacgggcaacaacttcacctttagctacaccttcgaggacgtgcctttccacagcagctacgcgcacagccagagtctggaccggctgatgaatcccctcatcgaccagtacctgtactacttggccagaacacagagcaacgcaggaggtactgctggcaatcgggaactgcagttttatcagggcggacctaccaccatggccgaacaagcaaagaactggctgcccggaccttgcttccggcaacagagagtatccaagacgctggatcaaaataacaacagcaactttgcctggactggtgccacaaaataccatttaaatggaagaaattcattggttaatcccggtgtcgccatggcaacccacaaggacgacgaggaacgcttcttcccttcgagcggagttctaatttttggcaaaactggagcagctaataaaactacattagaaaacgtgctcatgacaaatgaagaagaaattcgtcctaccaacccggtagctaccgaggaatacgggattgtaagcagcaacttgcaggcggctagcaccgcagcccagacacaagttgttaacaaccagggagccttacctggcatggtctggcagaaccgggacgtgtacctgcaaggtcccatttgggccaagattcctcacacggacggcaactttcacccgtctcctctaatgggtggctttggactgaaacacccgcctccccagatcctgatcaaaaacacaccggtacctgctaatcctccagaagtgtttactcctgccaagattgcttccttcatcacgcagtacagcaccgggcaagtcagcgttgagatcgagtgggagctgcagaaagagaacagcaagcgctggaacccagagattcagtacacctccaactttgacaaacagactggagtggactttgctgttgacagccagggtgtttactctgagcct

SEQ ID NO: 37 - protein, 644 aa, Artificial Sequence
  source: /note="Description of Artificial Sequence: Synthetic polypeptide"
KAYDQQLKAGDNPYLRYNHADAEFQERLQEDTSFGGNLGRAVFQAKKRVLEPLGLVETPAKTAPGKKRPVDSPDSTSGIGKKGQQPAKKRLNFGQTGDSESVPDPQPIGEPPAGPSGLGSGTMAAGGGAPMADNNEGADGVGNASGNWHCDSTWLGDRVITTSTRTWALPTYNNHLYKQISSQSAGSTNDNVYFGYSTPWGYFDFNRFHCHFSPRDWQRLINNNWGFRPKKLNFKLFNIQVKEVTTNDGVTTIANNLTSTVQVFSDPEYQLPYVLGSAHQGCLPPFPADVFMIPQYGYLTLNNGSQSVGRSSFYCLEYFPSQMLRTGNNFTFSYTFEDVPFHSSYAHSQSLDRLMNPLIDQYLYYLARTQSNAGGTAGNRELQFYQGGPTTMAEQAKNWLPGPCFRQQRVSKTLDQNNNSNFAWTGATKYHLNGRNSLVNPGVAMATHKDDEERFFPSSGVLIFGKTGAANKTTLENVLMTNEEEIRPTNPVATEEYGIVSSNLQAASTAAQTQVVNNQGALPGMVWQNRDVYLQGPIWAKIPHTDGNFHPSPLMGGFGLKHPPPQILIKNTPVPANPPEVFTPAKIASFITQYSTGQVSVEIEWELQKENSKRWNPEIQYTSNFDKQTGVDFAVDSQGVYSEP

SEQ ID NO: 38 - protein, 738 aa, Artificial Sequence
  source: /note="Description of Artificial Sequence: Synthetic polypeptide"
MAADGYLPDWLEDNLSEGIREWWALKPGAPKPKANQQKQDDGRGLVLPGYKYLGPFNGLDKGEPVNAADAAALEHDKAYDQQLKAGDNPYLRYNHADAEFQERLQEDTSFGGNLGRAVFQAKKRVLEPLGLVEEGAKTAPGKKRPVEPSPQRSPDSTTGIGKKGQQPAKKRLNFGQTGDSESVPDPQPIGEPPAGPSGLGSGTMAAGGGAPMADNNEGADGVGSSSGNWHCDSTWLGDRVITTSTRTWALPTYNNHLYKQISNGTSGGSTNDNTYFGYSTPWGYFDFNRFHCHFSPRDWQRLINNNWGFRPKRLNFKLFNIQVKEVTQNEGTKTIANNLTSTIQVFTDSEYQLPYVLGSARQGCLPPFPADVFMIPQYGYLTLNNGSQAVGRSSFYCLEYFPSQMLRTGNNFEFSYQFEDVPFHSSYAHSQSLDRLMNPLIDQYLYYLSRTQSTGGTAGTQQLLFSQAGPNNMSAQAKNWLPGPCYRQQRVSTTLSQNNNSNFAWTGATKYHLNGRDSLVNPGVAMATHKDDEERFFPSSGVLMFGKQGAGKGNVDYSSVMLTSEEEIKTTNPVATEQYGVVADNLQQQNAAPIVGAVNSQGALPGMVWQNRDVYLQGPIWAKIPHTDGNFHPSPLMGGFGLKHPPPQILIKNTPVPADPPTTFSQAKLASFITQYSTGQVSVEIEWELQKENSKRWNPEIQYTSNYYKSTNVDFAVNTDGTYSEPRPIGTRYLTRNL

SEQ ID NO: 39 - DNA, 3121 bp, Artificial Sequence
  source: /note="Description of Artificial Sequence: Synthetic polynucleotide"
gaattcgcccttctacggctgcgtcaactggaccaatgagaactttcccttcaacgactgtgtcgacaagatggtgatctggtgggaggaggggaagatgaccgccaaggtcgtggagtcggccaaagccattctcggaggaagcaaggtgcgcgtggaccagaaatgcaagtcctcggcccagatagacccgactcccgtgatcgtcacctccaacaccaacatgtgcgccgtgattgacgggaactcaacgaccttcgaacaccagcagccgttgcaagaccggatgttcaaatttgaactcacccgccgtctggatcatgactttgggaaggtcaccaagcaggaagtcaaagactttttccggtgggcaaaggatcacgtggttgaggtggagcacgaattctacgtcaaaaagggtggagccaagaaaagacccgcccccagtgacgcagatataagtgagcccaaacgggtgcgcgagtcagttgcgcagccatcgacgtcagacgcggaagcttcgatcaactacgcagacaggtaccaaaacaaatgttctcgtcacgcgggcatgaatctgatgctgtttccctgcagacaatgcgagagaatgaatcagaattcaaatatctgcttcactcacggacagaaagactgtttagagtgctttcccgtgtcagaatctcaacccgtttctgtcgtcaaaaaggcgtatcagaaactgtgctacattcatcatatcatgggaaaggtgccagacgcttgcactgcctgcgatctggtcgatgtggatttggatgactgcatctttgaacaataaatgatttaaatcaggtatggctgccgatggttatcttccagattggctcgaggacaacctctctgagggcattcgcgagtggtgggcgctgaaacctggagccccgaagcccaaagccaaccagcaaaagcaggacggcggccggggtctggtgcttcctggctacaagtacctcggacccttcaacggactcgacaagggggagcccgtcaacgcggcggacgcagcggccctcgagcacgacaaggcctacgaccagcagctcaaagcgggtgacaatccgtacctgcggtataaccacgccgacgccgagtttcaggagcgtctgcaagaagatacgtcttttgggggcaacctcgggcgagcagtcttccaggccaagaagcgggttctcgaacctctcggtctggttgaggaaggcgctaagacggctcctggaaagaagagaccggtagagccatcaccccagcgttctccagactcctctacgggcatcggcaagaaaggccagcagcccgcgaaaaagagactcaactttgggcagactggcgactcagagtcagtgcccgaccctcaaccaatcggagaaccccccgcaggcccctctggtctgggatctggtacaatggctgcaggcggtggcgctccaatggcagacaataacgaaggcgccgacggagtgggtagttcctcaggaaattggcattgcgattccacatggctgggcgactgagtcatcaccaccagcacccgaacctgggccctccccacctacaacaaccacctctacaagcaaatctccaacgggacttcgggaggaagcaccaacgacaacacctacttcggctacagcaccccctgggggtattttgactttaacagattccactgccacttctcaccacgtgactggcagcgactcatcaacaacaactggggattccggcccaagagactcaacttcaagctcttcaacatccaggtcaaggaggtcacgcagaatgaaggcaccaagaccatcgccaataaccttaccagcacgattcaggtctttacggactcggaataccagctcccgtacgtcctcggctctgcgcaccagggctgcctgcctccgttcccggcggacgtcttcatgattcctcagtacgggtacctgactctgaacaatggcagtcaggccgtgggccgttcctccttctactgcctggagtactttccttctcaaatgctgagaacgggcaacaactttgagttcagctaccagtttgaggacgtgccttttcacagcagctacgcgcacagccaaagcctggaccggctgatgaaccccctcatcgaccagtacctgtactacctgtctcggactcagtccacgggaggtaccgcaggaactcagcagttgctattttctcaggccgggcctaataacatgtcggctcaggccaaaaactggctacccgggccctgctaccggcagtaacgcgtctccacgacactgtcgcaaaataacaacagcaactttgtctggaccggtgccaccaagtatcatctgaatggcagagactctctggtagatcccggtgtcgctatggcaacccacaaggacgacgaagagcgattttttccgtccagcggagtcataatgtttgggaaacagggagctggaaaagacaacgtggactatagcagcgtcatgctaaccagtgaggaagaaattaaaaccaccaacccagtggccacagaacagtacggcgtggtggccgataacctgcaacagcaaaacgccgctcctattgtaggggccgtcaacagtcaaggagccttacctggcatggtctggcagaaccgggacgtgtacctgcagggtcctacctgggccaagattcctcacacggacggaaactttcatccctcgccgctgatgggaggctttggactgaaacacccgcctcctcagatcctgattaagaatacacctgttcccgcggatcctccaactaccttcagtcaagctaagctggcgtcgttcatcacgcagtacagcaccggacaggtcagcgtggaaattgaatgggagctgcaggaagaaaacagcaaacgctggaacccagagattcaatacacttccaactactacaaatctacaaatgtggactttgctgttaacacagatggcacttattctgagcctcgccccatcggcacccgttacctcacccgtaatctgtaattgcttgttaatcaataaaccggttgattcgtttcagttgaactttggtctctgcgaagggcgaattc

SEQ ID NO: 40 - protein, 738 aa, Artificial Sequence
  source: /note="Description of Artificial Sequence: Synthetic polypeptide"
MAADGYLPDWLEDNLSEGIREWWALKPGAPKPKANQQKQDDGRGLVLPGYKYLGPFNGLDKGEPVNAADAAALEHDKAYDQQLKAGDNPYLRYNHADAEFQERLQEDTSFGGNLGRAVFQAKKRVLEPLGLVEEGAKTAPGKKRPVEPSPQRSPDSSTGIGKKGQQPAKKRLNFGQTGDSESVPDPQPIGEPPAGPSGLGSGTMAAGGGAPMADNNEGADGVGSSSGNWHCDSTWLGDGVITTSTRTWALPTYNNHLYKQISNGTSGGSTNDNTYFGYSTPWGYFDFNRFHCHFSPRDWQRLINNNWGFRPKSLNFKLFNIQVKEVTQNEGTKTIANNLTSTIQVFTDSEYQLPYVLGSAHQGCLPPFPADVFMIPQYGYLTLNNGSQAVGRSSFYCLEYFPSQMLRTGNNFEFSYQFEDVPFHSSYAHSQSLDRLMNPLIDQYLYYLSRTQSTGGTAGTQQLLFSQAGPNNMSAQAKNWLPGPCYRQQRVSTTLSQNDNSNFAWTGATKYHLNGRDSLVNPGVAMATHKDDEERFFPSSGVLMFGKQGAGKDNVDYSSVMLTSEEEIKTTNPVATEQYGVVADNLQQQNAAPIVGAVNSQGALPGMVWQNRDVYLQGPIWAKIPHTDGNFHPSPLMGGFGLKHPPPQILIKNTPVPADPPTTFSQAKLASFITQYSTGQVSVEIEWELQKENSKRWNPEIQYTSNYYKSTNVDFAVNTDGTYSEPRPIGTRYLTRNL

SEQ ID NO: 41 - DNA, 3121 bp, Artificial Sequence
  source: /note="Description of Artificial Sequence: Synthetic polynucleotide"
gaattcgcccttcgcgagaccaaagttcaactgaaacgaatcaaccggtttattgattaacaagcaattacagattacgggtgaggtaacgggtgccgatggggcgaggctcagaataagtgccatctgtgttaacagcaaagtccacatttgtagatttgtagtagttggaagtgtattgaatctctgggttccagcgtttgctgttttctttctgcagctcccattcaatttccacgctgacctgtccggtgctgtactgcgtgatgaacgacgccagcttagcttgactgaaggtagttggaggatccgcgggaacaggtgtattcttaatcaggatctgaggaggcgggtgtttcagtccaaagcctcccatcagcggcgagggatgaaagtttccgtccgtgtgaggaatcttggcccagataggaccctgcaggtacacgtcccggttctgccagaccatgccaggtaaggctccttgactgttgacggcccctacaataggagcggcgttttgctgttgcaggttatcggccaccacgccgtactgttctgtggccactgggttggtggttttaatttcttcctcactggttagcataacgctgctatagtccacgttgtcttttccagctccctgtttcccaaacattaagactccgctggacggaaaaaatcgctcttcgtcgtccttgtgggttgccatagcgacaccgggatttaccagagagtctctgccattcagatgatacttggtggcaccggtccaggcaaagttgctgttgtcattttgcgacagtgtcgtggagacgcgttgctgccggtagcagggcccgggtagccagtttttggcctgagccgacatgttattaggcccggcctgagaaaatagcaactgctgagttcctgcggtacctcccgtggactgagtccgagacaggtagtacaggtactggtcgatgagggggttcatcagccggtccaggctttggctgtgcgcgtagctgctgtgaaaaggcacgtcctcaaactggtagctgaactcaaagttgttgcccgttctcagcatttgagaaggaaagtactccaggcagtagaaggaggaacggcccacggcctgactgccattgttcagagtcaggtacccgtactgaggaatcatgaagacgtccgccgggaacggaggcaggcagccctggtgcgcagagccgaggacgtacgggagctggtattccgagtccgtaaagacctgaatcgtgctggtaaggttattggcgatggtcttggtgccttcattctgcgtgacctccttgacctggatgttgaagagcttgaagttgaggctcttgggccggaatccccagttgttgttgatgagtcgctgccagtcacgtggtgagaagtggcagtggaatctgttaaagtcaaaatacccccagggggtgctgtagccgaagtaggtgttgtcgttggtgcttcctcccgaagtcccgttggagatttgcttgtagaggtggttgttgtaggtggggagggcccaggttcgggtgctggtggtgatgactccgtcgcccagccatgtggaatcgcaatgccaatttcctgaggaactacccactccgtcggcgccttcgttattgtctgccattggagcgccaccgcctgcagccattgtaccagatcccagaccagaggggcctgcggggggttctccgattggttgagggtcgggcactgactctgagtcgccagtctgcccaaagttgagtctctttttcgcgggctgctggcctttcttgccgatgcccgtagaggagtctggagaacgctggggtgatggctctaccggtctcttctttccaggagccgtcttagcgccttcctcaaccagaccgagaggttcgagaacccgcttcttggcctggaagactgctcgcccgaggttgcccccaaaagacgtatcttcttgcagacgctcctgaaactcggcgtcggcgtggttataccgcaggtacggattgtcacccgctttgagctgctggtcgtaggccttgtcgtgctcgagggccgctgcgtccgccgcgttgacgggctcccccttgtcgagtccgttgaagggtccgaggtacttgtagccaggaagcaccagaccccggccgtcgtcctgcttttgctggttggctttgggcttcggggctccaggtttcagcgcccaccactcgcgaatgccctcagagaggttgtcctcgagccaatctggaagataaccatcggcagccatacctgatttaaatcatttattgttcaaagatgcagtcatccaaatccacattgaccagatcgcaggcagtgcaagcgtctggcacctttcccatgatatgatgaatgtagcacagtttctgatacgcctttttgacgacagaaacgggttgagattctgacacgggaaagcactctaaacagtctttctgtccgtgagtgaagcagatatttgaattctgattcattctctcgcattgtctgcagggaaacagcatcagattcatgcccacgtgacgagaacatttgttttggtacctgtctgcgtagttgatcgaagcttccgcgtctgacgtcgatggctgcgcaactgactcgcgcacccgtttgggctcacttatatctgcgtcactgggggcgggtcttttcttggctccaccctttttgacgtagaattcatgctccacctcaaccacgtgatcctttgcccaccggaaaaagtctttgacttcctgcttggtgaccttcccaaagtcatgatccagacggcgggtgagttcaaatttgaacatccggtcttgcaacggctgctggtgttcgaaggtcgttgagttcccgtcaatcacggcgcacatgttggtgttggaggtgacgatcacgggagtcgggtctatctgggccgaggacttgcatttctggtccacgcgcaccttgcttcctccgagaatggctttggccgactccacgaccttggcggtcatcttcccctcctcccaccagatcaccatcttgtcgacacagtcgttgaagggaaagttctcattggtccagttgacgcagccgtagaaagggcgaattc

SEQ ID NO: 42 - DNA, 2211 bp, Artificial Sequence
  source: /note="Description of Artificial Sequence: Synthetic polynucleotide"
atggctgctgacggttatcttccagattggctcgaggacaacctttctgaaggcattcgtgagtggtgggctctgaaacctggagtccctcaacccaaagcgaaccaacaacaccaggacaaccgtcggggtcttgtgcttccgggttacaaatacctcggacccggtaacggactcgacaaaggagagccggtcaacgaggcggacgcggcagccctcgaacacgacaaagcttacgaccagcagctcaaggccggtgacaacccgtacctcaagtacaaccacgccgacgccgagtttcaggagcgtcttcaagaagatacgtcttttgggggcaaccttggcagagcagtcttccaggccaaaaagaggatccttgagcctcttggtctggttgaggaagcagctaaaacggctcctggaaagaagggggctgtagatcagtctcctcaggaaccggactcatcatctggtgttggcaaatcgggcaaacagcctgccagaaaaagactaaatttcggtcagactggagactcagagtcagtcccagaccctcaacctctcggagaaccaccagcagcccccacaagtttgggatctaatacaatggcttcaggcggtggcgcaccaatggcagacaataacgagggtgccgatggagtgggtaattcctcaggaaattggcattgcgattcccaatggctgggcgacagagtcatcaccaccagcaccagaacctgggccctgcccacttacaacaaccatctctacaagcaaatctccagccaatcaggagcttcaaacgacaaccactactttggctacagcaccccttgggggtattttgactttaacagattccactgccacttctcaccacgtgactggcagcgactcattaacaacaactggggattccggcccaagaaactcagcttcaagctcttcaacatccaagttagaggggtcacgcagaacgatggcacgacgactattgccaataaccttaccagcacggttcaagtgtttacggactcggagtatcagctcccgtacgtgctcgggtcggcgcaccaaggctgtctcccgccgtttccagcggacgtcttcatggtccctcagtatggatacctcaccctgaacaacggaagtcaagcggtgggacgctcatccttttactgcctggagtacttcccttcgcagatgctaaggactggaaataacttccaattcagctataccttcgaggatgtaccttttcacagcagctacgctcacagccagagtttggatcgcttgatgaatcctcttattgatcagtatctgtactacctgaacagaacgcaaggaacaacctctggaacaaccaaccaatcacggctgctttttagccaggctgggcctcagtctatgtctttgcaggccagaaattggctacctgggccctgctaccggcaacagagactttcaaagactgctaacgacaacaacaacagtaactttccttggacagcggccagcaaatatcatctcaatggccgcgactcgctggtgaatccaggaccagctatggccagtcacaaggacgatgaagaaaaatttttccctatgcacggcaatctaatatttggcaaagaagggacaacggcaagtaacgcagaattagataatgtaatgattacggatgaagaagagattcgtaccaccaatcctgtggcaacagagcagtatggaactgtggcaaataacttgcagagctcaaatacagctcccacgactggaactgtcaatcatcagggggccttacctggcatggtgtggcaagatcgtgacgtgtaccttcaaggacctatctgggcaaagattcctcacacggatggacactttcatccttctcctctgatgggaggctttggactgaaacatccgcctcctcaaatcatgatcaaaaatactccggtaccggcaaatcctccgacgactttcagcccggccaagtttgcttcatttatcactcagtactccactggacaggtcagcgtggaaattgagtgggagctacagaaagaaaacagcaaacgttggaatccagagattcagtacacttccaactacaacaagtctgttaatgtggactttactgtagacactaatggtgtttatagtgaacctcgccctattggaacccggtatctcacacgaaacttgtga

SEQ ID NO: 43 - protein, 736 aa, Adeno-associated virus 3
MAADGYLPDWLEDNLSEGIREWWALKPGVPQPKANQQHQDNRRGLVLPGYKYLGPGNGLDKGEPVNEADAAALEHDKAYDQQLKAGDNPYLKYNHADAEFQERLQEDTSFGGNLGRAVFQAKKRILEPLGLVEEAAKTAPGKKGAVDQSPQEPDSSSGVGKSGKQPARKRLNFGQTGDSESVPDPQPLGEPPAAPTSLGSNTMASGGGAPMADNNEGADGVGNSSGNWHCDSQWLGDRVITTSTRTWALPTYNNHLYKQISSQSGASNDNHYFGYSTPWGYFDFNRFHCHFSPRDWQRLINNNWGFRPKKLSFKLFNIQVRGVTQNDGTTTIANNLTSTVQVFTDSEYQLPYVLGSAHQGCLPPFPADVFMVPQYGYLTLNNGSQAVGRSSFYCLEYFPSQMLRTGNNFQFSYTFEDVPFHSSYAHSQSLDRLMNPLIDQYLYYLNRTQGTTSGTTNQSRLLFSQAGPQSMSLQARNWLPGPCYRQQRLSKTANDNNNSNFPWTAASKYHLNGRDSLVNPGPAMASHKDDEEKFFPMHGNLIFGKEGTTASNAELDNVMITDEEEIRTTNPVATEQYGTVANNLQSSNTAPTTGTVNHQGALPGMVWQDRDVYLQGPIWAKIPHTDGHFHPSPLMGGFGLKHPPPQIMIKNTPVPANPPTTFSPAKFASFITQYSTGQVSVEIEWELQKENSKRWNPEIQYTSNYNKSVNVDFTVDTNGVYSEPRPIGTRYLTRNL

SEQ ID NO: 44 - DNA, 4726 bp, Adeno-associated virus 3
ttggccactccctctatgcgcactcgctcgctcggtggggcctggcgaccaaaggtcgccagacggacgtgctttgcacgtccggccccaccgagcgagcgagtgcgcatagagggagtggccaactccatcactagaggtatggcagtgacgtaacgcgaagcgcgcgaagcgagaccacgcctaccagctgcgtcagcagtcaggtgacccttttgcgacagtttgcgacaccacgtggccgctgagggtatatattctcgagtgagcgaaccaggagctccattttgaccgcgaaatttgaacgagcagcagccatgccggggttctacgagattgtcctgaaggtcccgagtgacctggacgagcgcctgccgggcatttctaactcgtttgttaactgggtggccgagaaggaatgggacgtgccgccggattctgacatggatccgaatctgattgagcaggcacccctgaccgtggccgaaaagcttcagcgcgagttcctggtggagtggcgccgcgtgagtaaggccccggaggccctcttttttgtccagttcgaaaagggggagacctacttccacctgcacgtgctgattgagaccatcggggtcaaatccatggtggtcggccgctacgtgagccagattaaagagaagctggtgacccgcatctaccgcggggtcgagccgcagcttccgaactggttcgcggtgaccaaaacgcgaaatggcgccgggggcgggaacaaggtggtggacgactgctacatccccaactacctgctccccaagacccagcccgagctccagtgggcgtggactaacatggaccagtatttaagcgcctgtttgaatctcgcggagcgtaaacggctggtggcgcagcatctgacgcacgtgtcgcagacgcaggagcagaacaaagagaatcagaaccccaattctgacgcgccggtcatcaggtcaaaaacctcagccaggtacatggagctggtcgggtggctggtggaccgcgggatcacgtcagaaaagcaatggattcaggaggaccaggcctcgtacatctccttcaacgccgcctccaactcgcggtcccagatcaaggccgcgctggacaatgcctccaagatcatgagcctgacaaagacggctccggactacctggtgggcagcaacccgccggaggacattaccaaaaatcggatctaccaaatcctggagctgaacgggtacgatccgcagtacgcggcctccgtcttcctgggctgggcgcaaaagaagttcgggaagaggaacaccatctggctctttgggccggccacgacgggtaaaaccaacatcgcggaagccatcgcccacgccgtgcccttctacggctgcgtaaactggaccaatgagaactttcccttcaacgattgcgtcgacaagatggtgatctggtgggaggagggcaagatgacggccaaggtcgtggagagcgccaaggccattctgggcggaagcaaggtgcgcgtggaccaaaagtgcaagtcatcggcccagatcgaacccactcccgtgatcgtcacctccaacaccaacatgtgcgccgtgattgacgggaacagcaccaccttcgagcatcagcagccgctgcaggaccggatgtttgaatttgaacttacccgccgtttggaccatgactttgggaaggtcaccaaacaggaagtaaaggactttttccggtgggcttccgatcacgtgactgacgtggctcatgagttctacgtcagaaagggtggagctaagaaacgccccgcctccaatgacgcggatgtaagcgagccaaaacgggagtgcacgtcacttgcgcagccgacaacgtcagacgcggaagcaccggcggactacgcggacaggtaccaaaacaaatgttctcgtcacgtgggcatgaatctgatgctttttccctgtaaaacatgcgagagaatgaatcaaatttccaatgtctgttttacgcatggtcaaagagactgtggggaatgcttccctggaatgtcagaatctcaacccgtttctgtcgtcaaaaagaagacttatcagaaactgtgtccaattcatcatatcctgggaagggcacccgagattgcctgttcggcctgcgatttggccaatgtggacttggatgactgtgtttctgagcaataaatgacttaaaccaggtatggctgctgacggttatcttccagattggctcgaggacaacctttctgaaggcattcgtgagtggtgggctctgaaacctggagtccctcaacccaaagcgaaccaacaacaccaggacaaccgtcggggtcttgtgcttccgggttacaaatacctcggacccggtaacggactcgacaaaggagagccggtcaacgaggcggacgcggcagccctcgaacacgacaaagcttacgaccagcagctcaaggccggtgacaacccgtacctcaagtacaaccacgccgacgccgagtttcaggagcgtcttcaagaagatacgtcttttgggggcaaccttggcagagcagtcttccaggccaaaaagaggatccttgagcctcttggtctggttgaggaagcagctaaaacggctcctggaaagaagggggctgtagatcagtctcctcaggaaccggactcatcatctggtgttggcaaatcgggcaaacagcctgccagaaaaagactaaatttcggtcagactggagactcagagtcagtcccagaccctcaacctctcggagaaccaccagcagcccccacaagtttgggatctaatacaatggcttcaggcggtggcgcaccaatggcagacaataacgagggtgccgatggagtgggtaattcctcaggaaattggcattgcgattcccaatggctgggcgacagagtcatcaccaccagcaccagaacctgggccctgcccacttacaacaaccatctctacaagcaaatctccagccaatcaggagcttcaaacgacaaccactactttggctacagcaccccttgggggtattttgactttaacagattccactgccacttctcaccacgtgactggcagcgactcattaacaacaactggggattccggcccaagaaactcagcttcaagctcttcaacatccaagttagaggggtcacgcagaacgatggcacgacgactattgccaataaccttaccagcacggttcaagtgtttacggactcggagtatcagctcccgtacgtgctcgggtcggcgcaccaaggctgtctcccgccgtttccagcggacgtcttcatggtccctcagtatggatacctcaccctgaacaacggaagtcaagcggtgggacgctcatccttttactgcctggagtacttcccttcgcagatgctaaggactggaaataacttccaattcagctataccttcgaggatgtaccttttcacagcagctacgctcacagccagagtttggatcgcttgatgaatcctcttattgatcagtatctgtactacctgaacagaacgcaaggaacaacctctggaacaaccaaccaatcacggctgctttttagccaggctgggcctcagtctatgtctttgcaggccagaaattggctacctgggccctgctaccggcaacagagactttcaaagactgctaacgacaacaacaacagtaactttccttggacagcggccagcaaatatcatctcaatggccgcgactcgctggtgaatccaggaccagctatggccagtcacaaggacgatgaagaaaaatttttccctatgcacggcaatctaatatttggcaaagaagggacaacggcaagtaacgcagaattagataatgtaatgattacggatgaagaagagattcgtaccaccaatcctgtggcaacagagcagtatggaactgtggcaaataacttgcagagctcaaatacagctcccacgactggaactgtcaatcatcagggggccttacctggcatggtgtggcaagatcgtgacgtgtaccttcaaggacctatctgggcaaagattcctcacacggatggacactttcatccttctcctctgatgggaggctttggactgaaacatccgcctcctcaaatcatgatcaaaaatactccggtaccggcaaatcctccgacgactttcagcccggccaagtttgcttcatttatcactcagtactccactggacaggtcagcgtggaaattgagtgggagctacagaaagaaaacagcaaacgttggaatccagagattcagtacacttccaactacaacaagtctgttaatgtggactttactgtagacactaatggtgtttatagtgaacctcgccctattggaacccggtatctcacacgaaacttgtgaatcctggttaatcaataaaccgtttaattcgtttcagttgaactttggctcttgtgcacttctttatctttatcttgtttccatggctactgcgtagataagcagcggcctgcggcgcttgcgcttcgcggtttacaactgctggttaatatttaactctcgccatacctctagtgatggagttggccactccctctatgcgcactcgctcgctcggtggggcctggcgaccaaaggtcgccagacggacgtgctttgcacgtccggccccaccgagcgagcgagtgcgcatagagggagtggccaa

SEQ ID NO: 45 - protein, 737 aa, Artificial Sequence
  source: /note="Description of Artificial Sequence: Synthetic polypeptide"
MAADGYLPDWLEDNLSEGIREWWDLKPGAPKPKANQQKQDNGRGLVLPGYKYLGPFNGLDKGEPVNAADAAALEHDKAYDQQLNAGDNPYLRYNHADAEFQERLQEDTSFGGNLGRAVFQAKKRVLEPLGLVEEGAKTAPAKKRPVEPSPQRSPDSSTGIGKKGQQPARKRLNFGQTGDSESVPDPQPLGEPPAAPSSVGSGTVAAGGGAPMADNNEGADGVGNASGNWHCDSTWLGDRVITTSTRTWALPTYNNHLYEQISSETAGSTNDNTYFGYSTPWGYFDFNRFHCHFSPRDWQRLINNNWGFRPKKLRFKLFNIQVKEVTTNDGVTTIANNLTSTIQVFSDSEYQLPYVLGSAHQGCLPPFPADVFMIPQYGYLTLNNGSQSVGRSSFYCLEYFPSQMLRTGNNFEFSYSFEDVPFHSSYAHSQSLDRLMNPLIDQYLYYLARTQSDPGGTAGNRELQFYQGGPSTMAEQAKNWLPGPCFRQQRVSKTLDQNNNSNFAWTGATKYHLNGRNSLVNPGVAMATHKDDEDRFFPSSGVLIFGKTGATNKTTLENVLMTNEEEIRPTNPVATEEYGIVSSNLQAANTAAQTQVVNNQGALPGMVWQNRDVYLQGPIWAKIPHTDGNFHPSPLMGGFGLKHPPPQILIKNTPVPANPPEVFTPAKFASFITQYSTGQVSVEIEWELQKENSKRWDPEIQYTSNFEKQTGVDFAVDSQGVYSEPRPIGTRYLTRNL

SEQ ID NO: 46 - DNA, 2211 bp, Artificial Sequence
  source: /note="Description of Artificial Sequence: Synthetic polynucleotide"
atggctgctgacggttatcttccagattggctcgaggacaacctttctgaaggcattcgtgagtggtgggctctgaaacctggagtccctcaacccaaagcgaaccaacaacaccaggacaaccgtcggggtcttgtgcttccgggttacaaatacctcggacccggtaacggactcgacaaaggagagccggtcaacgaggcggacgcggcagccctcgaacacgacaaagcttacgaccagcagctcaaggccggtgacaacccgtacctcaagtacaaccacgccgacgccgagtttcaggagcgtcttcaagaagatacgtcttttgggggcaaccttggcagagcagtcttccaggccaaaaagaggatccttgagcctcttggtctggttgaggaagcagctaaaacggctcctggaaagaagggggctgtagatcagtctcctcaggaaccggactcatcatctggtgttggcaaatcgggcaaacagcctgccagaaaaagactaaatttcggtcagactggagactcagagtcagtcccagaccctcaacctctcggagaaccaccagcagcccccacaagtttgggatctaatacaatggcttcaggcggtggcgcaccaatggcagacaataacgagggtgccgatggagtgggtaattcctcaggaaattggcattgcgattcccaatggctgggcgacagagtcatcaccaccagcaccagaacctgggccctgcccacttacaacaaccatctctacaagcaaatctccagccaatcaggagcttcaaacgacaaccactactttggctacagcaccccttgggggtattttgactttaacagattccactgccacttctcaccacgtgactggcagcgactcattaacaacaactggggattccggcccaagaaactcagcttcaagctcttcaacatccaagttagaggggtcacgcagaacgatggcacgacgactattgccaataaccttaccagcacggttcaagtgtttacggactcggagtatcagctcccgtacgtgctcgggtcggcgcaccaaggctgtctcccgccgtttccagcggacgtcttcatggtccctcagtatggatacctcaccctgaacaacggaagtcaagcggtgggacgctcatccttttactgcctggagtacttcccttcgcagatgctaaggactggaaataacttccaattcagctataccttcgaggatgtaccttttcacagcagctacgctcacagccagagtttggatcgcttgatgaatcctcttattgatcagtatctgtactacctgaacagaacgcaaggaacaacctctggaacaaccaaccaatcacggctgctttttagccaggctgggcctcagtctatgtctttgcaggccagaaattggctacctgggccctgctaccggcaacagagactttcaaagactgctaacgacaacaacaacagtaactttccttggacagcggccagcaaatatcatctcaatggccgcgactcgctggtgaatccaggaccagctatggccagtcacaaggacgatgaagaaaaatttttccctatgcacggcaatctaatatttggcaaagaagggacaacggcaagtaacgcagaattagataatgtaatgattacggatgaagaagagattcgtaccaccaatcctgtggcaacagagcagtatggaactgtggcaaataacttgcagagctcaaatacagctcccacgactggaactgtcaatcatcagggggccttacctggcatggtgtggcaagatcgtgacgtgtaccttcaaggacctatctgggcaaagattcctcacacggatggacactttcatccttctcctctgatgggaggctttggactgaaacatccgcctcctcaaatcatgatcaaaaatactccggtaccggcaaatcctccgacgactttcagcccggccaagtttgcttcatttatcactcagtactccactggacaggtcagcgtggaaattgagtgggagctacagaaagaaaacagcaaacgttggaatccagagattcagtacacttccaactacaacaagtctgttaatgtggactttactgtagacactaatggtgtttatagtgaacctcgccctattggaacccggtatctcacacgaaacttgtaa

SEQ ID NO: 47 - protein, 736 aa, Artificial Sequence; identical to SEQ ID NO: 43
  source: /note="Description of Artificial Sequence: Synthetic polypeptide"

SEQ ID NO: 48 - protein, 736 aa, Adeno-associated virus 3; identical to SEQ ID NO: 43

SEQ ID NO: 49 - protein, 624 aa, Adeno-associated virus 3
MPGFYEIVLKVPSDLDERLPGISNSFVNWVAEKEWDVPPDSDMDPNLIEQAPLTVAEKLQREFLVEWRRVSKAPEALFFVQFEKGETYFHLHVLIETIGVKSMVVGRYVSQIKEKLVTRIYRGVEPQLPNWFAVTKTRNGAGGGNKVVDDCYIPNYLLPKTQPELQWAWTNMDQYLSACLNLAERKRLVAQHLTHVSQTQEQNKENQNPNSDAPVIRSKTSARYMELVGWLVDRGITSEKQWIQEDQASYISFNAASNSRSQIKAALDNASKIMSLTKTAPDYLVGSNPPEDITKNRIYQILELNGYDPQYAASVFLGWAQKKFGKRNTIWLFGPATTGKTNIAEAIAHAVPFYGCVNWTNENFPFNDCVDKMVIWWEEGKMTAKVVESAKAILGGSKVRVDQKCKSSAQIEPTPVIVTSNTNMCAVIDGNSTTFEHQQPLQDRMFEFELTRRLDHDFGKVTKQEVKDFFRWASDHVTDVAHEFYVRKGGAKKRPASNDADVSEPKRECTSLAQPTTSDAEAPADYADRYQNKCSRHVGMNLMLFPCKTCERMNQISNVCFTHGQRDCGECFPGMSESQPVSVVKKKTYQKLCPIHHILGRAPEIACSACDLANVDLDDCVSEQ

SEQ ID NO: 50 - protein, 736 aa, Adeno-associated virus 3
MAADGYLPDWLEDNLSEGIREWWALKPGVPQPKANQQHQDNRRGLVLPGYKYLGPGNGLDKGEPVNEADAAALEHDKAYDQQLKAGDNPYLKYNHADAEFQERLQEDTSFGGNLGRAVFQAKKRILEPLGLVEEAAKTAPGKKRPVDQSPQEPDSSSGVGKSGKQPARKRLNFGQTGDSESVPDPQPLGEPPAAPTSLGSNTMASGGGAPMADNNEGADGVGNSSGNWHCDSQWLGDRVITTSTRTWALPTYNNHLYKQISSQSGASNDNHYFGYSTPWGYFDFNRFHCHFSPRDWQRLINNNWGFRPKKLSFKLFNIQVKEVTQNDGTTTIANNLTSTVQVFTDSEYQLPYVLGSAHQGCLPPFPADVFMVPQYGYLTLNNGSQAVGRSSFYCLEYFPSQMLRTGNNFQFSYTFEDVPFHSSYAHSQSLDRLMNPLIDQYLYYLNRTQGTTSGTTNQSRLLFSQAGPQSMSLQARNWLPGPCYRQQRLSKTANDNNNSNFPWTAASKYHLNGRDSLVNPGPAMASHKDDEEKFFPMHGNLIFGKEGTTASNAELDNVMITDEEEIRTTNPVATEQYGTVANNLQSSNTAPTTRTVNDQGALPGMVWQDRDVYLQGPIWAKIPHTDGHFHPSPLMGGFGLKHPPPQIMIKNTPVPANPPTTFSPAKFASFITQYSTGQVSVEIEWELQKENSKRWNPEIQYTSNYNKSVNVDFTVDTNGVYSEPRPIGTRYLTRNL

SEQ ID NO: 51 - protein, 624 aa, Adeno-associated virus 3
MPGFYEIVLKVPSDLDEHLPGISNSFVNWVAEKEWELPPDSDMDPNLIEQAPLTVAEKLQREFLVEWRRVSKAPEALFFVQFEKGETYFHLHVLIETIGVKSMVVGRYVSQIKEKLVTRIYRGVEPQLPNWFAVTKTRNGAGGGNKVVDDCYIPNYLLPKTQPELQWAWTNMDQYLSACLNLAERKRLVAQHLTHVSQTQEQNKENQNPNSDAPVIRSKTSARYMELVGWLVDRGITSEKQWIQEDQASYISFNAASNSRSQIKAALDNASKIMSLTKTAPDYLVGSNPPEDITKNRIYQILELNGYDPQYAASVFLGWAQKKFGKRNTIWLFGPATTGKTNIAEAIAHAVPFYGCVNWTNENFPFNDCVDKMVIWWEEGKMTAKVVESAKAILGGSKVRVDQKCKSSAQIEPTPVIVTSNTNMCAVIDGNSTTFEHQQPLQDRMFKFELTRRLDHDFGKVTKQEVKDFFRWASDHVTDVAHEFYVRKGGAKKRPASNDADVSEPKRQCTSLAQPTTSDAEAPADYADRYQNKCSRHVGMNLMLFPCKTCERMNQISNVCFTHGQRDCGECFPGMSESQPVSVVKKKTYQKLCPIHHILGRAPEIACSACDLANVDLDDCVSEQ

SEQ ID NO: 52 - DNA, 4722 bp, Adeno-associated virus 3
tggccactccctctatgcgcactcgctcgctcggtggggcctggcgaccaaaggtcgccagacggacgtgctttgcacgtccggccccaccgagcgagcgagtgcgcatagagggagtggccaactccatcactagaggtatggcagtgacgtaacgcgaagcgcgcgaagcgagaccacgcctaccagctgcgtcagcagtcaggtgacccttttgcgacagtttgcgacaccacgtggccgctgagggtatatattctcgagtgagcgaaccaggagctccattttgaccgcgaaatttgaacgagcagcagccatgccggggttctacgagattgtcctgaaggtcccgagtgacctggacgagcacctgccgggcatttctaactcgtttgttaactgggtggccgagaaggaatgggagctgccgccggattctgacatggatccgaatctgattgagcaggcacccctgaccgtggccgaaaagcttcagcgcgagttcctggtggagtggcgccgcgtgagtaaggccccggaggccctcttttttgtccagttcgaaaagggggagacctacttccacctgcacgtgctgattgagaccatcggggtcaaatccatggtggtcggccgctacgtgagccagattaaagagaagctggtgacccgcatctaccgcggggtcgagccgcagcttccgaactggttcgcggtgaccaaaacgcgaaatggcgccgggggcgggaacaaggtggtggacgactgctacatccccaactacctgctccccaagacccagcccgagctccagtgggcgtggactaacatggaccagtatttaagcgcctgtttgaatctcgcggagcgtaaacggctggtggcgcagcatctgacgcacgtgtcgcagacgcaggagcagaacaaagagaatcagaaccccaattctgacgcgccggtcatcaggtcaaaaacctcagccaggtacatggagctggtcgggtggctggtggaccgcgggatcacgtcagaaaagcaatggattcaggaggaccaggcctcgtacatctccttcaacgccgcctccaactcgcggtcccagatcaaggccgcgctggacaatgcctccaagatcatgagcctgacaaagacggctccggactacctggtgggcagcaacccgccggaggacattaccaaaaatcggatctaccaaatcctggagctgaacgggtacgatccgcagtacgcggcctccgtcttcctgggctgggcgcaaaagaagttcgggaagaggaacaccatctggctctttgggccggccacgacgggtaaaaccaacatcgcggaagccatcgcccacgccgtgcccttctacggctgcgtaaactggaccaatgagaactttcccttcaacgattgcgtcgacaagatggtgatctggtgggaggagggcaagatgacggccaaggtcgtggagagcgccaaggccattctgggcggaagcaaggtgcgcgtggaccaaaagtgcaagtcatcggcccagatcgaacccactcccgtgatcgtcacctccaacaccaacatgtgcgccgtgattgacgggaacagcaccaccttcgagcatcagcagccgctgcaggaccggatgtttaaatttgaacttacccgccgtttggaccatgactttgggaaggtcaccaaacaggaagtaaaggactttttccggtgggcttccgatcacgtgactgacgtggctcatgagttctacgtcagaaagggtggagctaagaaacgccccgcctccaatgacgcggatgtaagcgagccaaaacggcagtgcacgtcacttgcgcagccgacaacgtcagacgcggaagcaccggcggactacgcggacaggtaccaaaacaaatgttctcgtcacgtgggcatgaatctgatgctttttccctgtaaaacatgcgagagaatgaatcaaatttccaatgtctgttttacgcatggtcaaagagactgtggggaatgcttccctggaatgtcagaatctcaacccgtttctgtcgtcaaaaagaagacttatcagaaactgtgtccaattcatcatatcctgggaagggcacccgagattgcctgttcggcctgcgatttggccaatgtggacttggatgactgtgtttctgagcaataaatgacttaaaccaggtatggctgctgacggttatcttccagattggctcgaggacaacctttctgaaggcattcgtgagtggtgggctctgaaacctggagtccctcaacccaaagcgaaccaacaacaccaggacaaccgtcggggtcttgtgcttccgggttacaaatacctcggacccggtaacggactcgacaaaggagagccggtcaacgaggcggacgcggcagccctcgaacacgacaaagcttacgaccagcagctcaaggccggtgacaacccgtacctcaagtacaaccacgccgacgccgagtttcaggagcgtcttcaagaagatacgtcttttgggggcaaccttggcagagcagtcttccaggccaaaaagaggatccttgagcctcttggtctggttgaggaagcagctaaaacggctcctggaaagaagaggcctgtagatcagtctcctcaggaaccggactcatcatctggtgttggcaaatcgggcaaacagcctgccagaaaaagactaaatttcggtcagactggcgactcagagtcagtcccagaccctcaacctctcggagaaccaccagcagcccccacaagtttgggatctaatacaatggcttcaggcggtggcgcaccaatggcagacaataacgagggtgccgatggagtgggtaattcctcaggaaattggcattgcgattcccaatggctgggcgacagagtcatcaccaccagcaccagaacctgggccctgcccacttacaacaaccatctctacaagcaaatctccagccaatcaggagcttcaaacgacaaccactactttggctacagcaccccttgggggtattttgactttaacagattccactgccacttctcaccacgtgactggcagcgactcattaacaacaactggggattccggcccaagaaactcagcttcaagctcttcaacatccaagttaaagaggtcacgcagaacgatggcacgacgactattgccaataaccttaccagcacggttcaagtgtttacggactcggagtatcagctcccgtacgtgctcgggtcggcgcaccaaggctgtctcccgccgtttccagcggacgtcttcatggtccctcagtatggatacctcaccctgaacaacggaagtcaagcggtgggacgctcatccttttactgcctggagtacttcccttcgcagatgctaaggactggaaataacttccaattcagctataccttcgaggatgtaccttttcacagcagctacgctcacagccagagtttggatcgcttgatgaatcctcttattgatcagtatctgtactacctgaacagaacgcaaggaacaacctctggaacaaccaaccaatcacggctgctttttagccaggctgggcctcagtctatgtctttgcaggccagaaattggctacctgggccctgctaccggcaacagagactttcaaagactgctaacgacaacaacaacagtaactttccttggacagcggccagcaaatatcatctcaatggccgcgactcgctggtgaatccaggaccagctatggccagtcacaaggacgatgaagaaaaatttttccctatgcacggcaatctaatatttggcaaagaagggacaacggcaagtaacgcagaattagataatgtaatgattacggatgaagaagagattcgtaccaccaatcctgtggcaacagagcagtatggaactgtggcaaataacttgcagagctcaaatacagctcccacgactagaactgtcaatgatcagggggccttacctggcatggtgtggcaagatcgtgacgtgtaccttcaaggacctatctgggcaaagattcctcacacggatggacactttcatccttctcctctgatgggaggctttggactgaaacatccgcctcctcaaatcatgatcaaaaatactccggtaccggcaaatcctccgacgactttcagcccggccaagtttgcttcatttatcactcagtactccactggacaggtcagcgtggaaattgagtgggagctacagaaagaaaacagcaaacgttggaatccagagattcagtacacttccaactacaacaagtctgttaatgtggactttactgtagacactaatggtgtttatagtgaacctcgccctattggaacccggtatctcacacgaaacttgtaatcctggttaatcaataaaccgtttaattcgtttcagttgaactttggctcttgtgcacttcttatcttatcttgtttccatggctactgcgtagataagcagcggcctgcggcgcttgcgcttcgcggtttacaactgctggttaatatttaactctcgccatacctctagtgatggagttggccactccctctatgcgcactcgctcgctcggtggggccggacgtgcaaagcacgtccgtctggcgacctttggtcgccaggccccaccgagcgagcgagtgcgcatagagggagtggccaa

SEQ ID NO: 53 - DNA, 1800 bp, Adeno-associated virus 4
  modified_base (342)..(342): a, c, t, or g
acggctcctggaaagaagagaccgttgattgaatccccccagcagcccgactcctccacgggtatcggcaaaaaaggcaagcagccggctaaaaagaagctcgttttcgaagacgaaactggagcaggcgacggaccccctgagggatcaacttccggagccatgtctgatgacagtgagatgcgtgcagcagctggcggagctgcagtcgagggsggacaaggtgccgatggagtgggtaatgcctcgggtgattggcattgcgattccacctggtctgagggccacgtcacgaccaccagcaccagaacctgggtcttgcccacctacaacaaccacctntacaagcgactcggagagagcctgcagtccaacacctacaacggattctccaccccctggggatactttgacttcaaccgcttccactgccacttctcaccacgtgactggcagcgactcatcaacaacaactggggcatgcgacccaaagccatgcgggtcaaaatcttcaacatccaggtcaaggaggtcacgacgtcgaacggcgagacaacggtggctaataaccttaccagcacggttcagatctttgcggactcgtcgtacgaactgccgtacgtgatggatgcgggtcaagagggcagcctgcctccttttcccaacgacgtctttatggtgccccagtacggctactgtggactggtgaccggcaacacttcgcagcaacagactgacagaaatgccttctactgcctggagtactttccttcgcagatgctgcggactggcaacaactttgaaattacgtacagttttgagaaggtgcctttccactcgatgtacgcgcacagccagagcctggaccggctgatgaaccctctcatcgaccagtacctgtggggactgcaatcgaccaccaccggaaccaccctgaatgccgggactgccaccaccaactttaccaagctgcggcctaccaacttttccaactttaaaaagaactggctgcccgggccttcaatcaagcagcagggcttctcaaagactgccaatcaaaactacaagatccctgccaccgggtcagacagtctcatcaaatacgagacgcacagcactctggacggaagatggagtgccctgacccccggacctccaatggccacggctggacctgcggacagcaagttcagcaacagccagctcatctttgcggggcctaaacagaacggcaacacggccaccgtacccgggactctgatcttcacctctgaggaggagctggcagccaccaacgccaccgatacggacatgtggggcaacctacctggcggtgaccagagcaacagcaacctgccgaccgtggacagactgacagccttgggagccgtgcctggaatggtctggcaaaacagagacatttactaccagggtcccatttgggccaagattcctcataccgatggacactttcacccctcaccgctgattggtgggtttgggctgaaacacccgcctcctcaaatttttatcaagaacaccccggtacctgcgaatcctgcaacgaccttcagctctactccggtaaactccttcattactcagtacagcactggccaggtgtcggtgcagattgactgggagatccagaaggagcggtccaaacgctggaaccccgaggtccagtttacctccaactacggacagcaaaactctctgttgtgggctcccgatgcggctgggaaatacactgagcctagggctatcggtacccgctacctcacccaccacctgtaataa

SEQ ID NO: 54 - DNA, 2208 bp, Adeno-associated virus 4
  modified_base (750)..(750): a, c, t, or g
atgactgacggttaccttccagattggctagaggacaacctctctgaaggcgttcgagagtggtgggcgctgcaacctggagcccctaaacccaaggcaaatcaacaacatcaggacaacgctcggggtcttgtgcttccgggttacaaatacctcggacccggcaacggactcgacaagggggaacccgtcaacgcagcggacgcggcagccctcgagcacgacaaggcctacgaccagcagctcaaggccggtgacaacccctacctcaagtacaaccacgccgacgcggagttccagcagcggcttcagggcgacacatcgtttgggggcaacctcggcagagcagtcttccaggccaaaaagagggttcttgaacctcttggtctggttgagcaagcgggtgagacggctcctggaaagaagagaccgttgattgaatccccccagcagcccgactcctccacgggtatcggcaaaaaaggcaagcagccggctaaaaagaagctcgttttcgaagacgaaactggagcaggcgacggaccccctgagggatcaacttccggagccatgtctgatgacagtgagatgcgtgcagcagctggcggagctgcagtcgagggsggacaaggtgccgatggagtgggtaatgcctcgggtgattggcattgcgattccacctggtctgagggccacgtcacgaccaccagcaccagaacctgggtcttgcccacctacaacaaccacctntacaagcgactcggagagagcctgcagtccaacacctacaacggattctccaccccctggggatactttgacttcaaccgcttccactgccacttctcaccacgtgactggcagcgactcatcaacaacaactggggcatgcgacccaaagccatgcgggtcaaaatcttcaacatccaggtcaaggaggtcacgacgtcgaacggcgagacaacggtggctaataaccttaccagcacggttcagatctttgcggactcgtcgtacgaactgccgtacgtgatggatgcgggtcaagagggcagcctgcctccttttcccaacgacgtctttatggtgccccagtacggctactgtggactggtgaccggcaacacttcgcagcaacagactgacagaaatgccttctactgcctggagtactttccttcgcagatgctgcggactggcaacaactttgaaattacgtacagttttgagaaggtgcctttccactcgatgtacgcgcacagccagagcctggaccggctgatgaaccctctcatcgaccagtacctgtggggactgcaatcgaccaccaccggaaccaccctgaatgccgggactgccaccaccaactttaccaagctgcggcctaccaacttttccaactttaaaaagaactggctgcccgggccttcaatcaagcagcagggcttctcaaagactgccaatcaaaactacaagatccctgccaccgggtcagacagtctcatcaaatacgagacgcacagcactctggacggaagatggagtgccctgacccccggacctccaatggccacggctggacctgcggacagcaagttcagcaacagccagctcatctttgcggggcctaaacagaacggcaacacggccaccgtacccgggactctgatcttcacctctgaggaggagctggcagccaccaacgccaccgatacggacatgtggggcaacctacctggcggtgaccagagcaacagcaacctgccgaccgtggacagactgacagccttgggagccgtgcctggaatggtctggcaaaacagagacatttactaccagggtcccatttgggccaagattcctcataccgatggacactttcacccctcaccgctgattggtgggtttgggctgaaacacccgcctcctcaaatttttatcaagaacaccccggtacctgcgaatcctgcaacgaccttcagctctactccggtaaactccttcattactcagtacagcactggccaggtgtcggtgcagattgactgggagatccagaaggagcggtccaaacgctggaaccccgaggtccagtttacctccaactacggacagcaaaactctctgttgtgggctcccgatgcggctgggaaatacactgagcctagggctatcggtacccgctacctcacccaccacctgtaataa

SEQ ID NO: 55 - DNA, 1872 bp, Adeno-associated virus 4
atgccggggttctacgagatcgtgctgaaggtgcccagcgacctggacgagcacctgcccggcatttctgactcttttgtgagctgggtggccgagaaggaatgggagctgccgccggattctgacatggacttgaatctgattgagcaggcacccctgaccgtggccgaaaagctgcaacgcgagttcctggtcgagtggcgccgcgtgagtaaggccccggaggccctcttctttgtccagttcgagaagggggacagctacttccacctgcacatcctggtggagaccgtgggcgtcaaatccatggtggtgggccgctacgtgagccagattaaagagaagctggtgacccgcatctaccgcggggtcgagccgcagcttccgaactggttcgcggtgaccaagacgcgtaatggcgccggaggcgggaacaaggtggtggacgactgctacatccccaactacctgctccccaagacccagcccgagctccagtgggcgtggactaacatggaccagtatataagcgcctgtttgaatctcgcggagcgtaaacggctggtggcgcagcatctgacgcacgtgtcgcagacgcaggagcagaacaaggaaaaccagaaccccaattctgacgcgccggtcatcaggtcaaaaacctccgccaggtacatggagctggtcgggtggctggtggaccgcgggatcacgtcagaaaagcaatggatccaggaggaccaggcgtcctacatctccttcaacgccgcctccaactcgcggtcacaaatcaaggccgcgctggacaatgcctccaaaatcatgagcctgacaaagacggctccggactacctggtgggccagaacccgccggaggacatttccagcaaccgcatctaccgaatcctcgagatgaacgggtacgatccgcagtacgcggcctccgtcttcctgggctgggcgcaaaagaagttcgggaagaggaacaccatctggctctttgggccggccacgacgggtaaaaccaacatcgcggaagccatcgcccacgccgtgcccttctacggctgcgtgaactggaccaatgagaactttccgttcaacgattgcgtcgacaagatggtgatctggtgggaggagggcaagatgacggccaaggtcgtagagagcgccaaggccatcctgggcggaagcaaggtgcgcgtggaccaaaagtgcaagtcatcggcccagatcgacccaactcccgtgatcgtcacctccaacaccaacatgtgcgcggtcatcgacggaaactcgaccaccttcgagcaccaacaaccactccaggaccggatgttcaagttcgagctcaccaagcgcctggagcacgactttggcaaggtcaccaagcaggaagtcaaagactttttccggtgggcgtcagatcacgtgaccgaggtgactcacgagttttacgtcagaaagggtggagctagaaagaggcccgcccccaatgacgcagatataagtgagcccaagcgggcctgtccgtcagttgcgcagccatcgacgtcagacgcggaagctccggtggactacgcggacaggtaccaaaacaaatgttctcgtcacgtgggtatgaatctgatgctttttccctgccggcaatgcgagagaatgaatcagaatgtggacatttgcttcacgcacggggtcatggactgtgccgagtgcttccccgtgtcagaatctcaacccgtgtctgtcgtcagaaagcggacgtatcagaaactgtgtccgattcatcacatcatggggagggcgcccgaggtggcctgctcggcctgcgaactggccaatgtggacttggatgactgtgacatggaacaataa

SEQ ID NO: 56 - DNA, 1611 bp, Adeno-associated virus 4
atgccggggttctacgagatcgtgctgaaggtgcccagcgacctggacgagcacctgcccggcatttctgactcttttgtgagctgggtggccgagaaggaatgggagctgccgccggattctgacatggacttgaatctgattgagcaggcacccctgaccgtggccgaaaagctgcaacgcgagttcctggtcgagtggcgccgcgtgagtaaggccccggaggccctcttctttgtccagttcgagaagggggacagctacttccacctgcacatcctggtggagaccgtgggcgtcaaatccatggtggtgggccgctacgtgagccagattaaagagaagctggtgacccgcatctaccgcggggtcgagccgcagcttccgaactggttcgcggtgaccaagacgcgtaatggcgccggaggcgggaacaaggtggtggacgactgctacatccccaactacctgctccccaagacccagcccgagctccagtgggcgtggactaacatggaccagtatataagcgcctgtttgaatctcgcggagcgtaaacggctggtggcgcagcatctgacgcacgtgtcgcagacgcaggagcagaacaaggaaaaccagaaccccaattctgacgcgccggtcatcaggtcaaaaacctccgccaggtacatggagctggtcgggtggctggtggaccgcgggatcacgtcagaaaagcaatggatccaggaggaccaggcgtcctacatctccttcaacgccgcctccaactcgcggtcacaaatcaaggccgcgctggacaatgcctccaaaatcatgagcctgacaaagacggctccggactacctggtgggccagaacccgccggaggacatttccagcaaccgcatctaccgaatcctcgagatgaacgggtacgatccgcagtacgcggcctccgtcttcctgggctgggcgcaaaagaagttcgggaagaggaacaccatctggctctttgggccggccacgacgggtaaaaccaacatcgcggaagccatcgcccacgccgtgcccttctacggctgcgtgaactggaccaatgagaactttccgttcaacgattgcgtcgacaagatggtgatctggtgggaggagggcaagatgacggccaaggtcgtagagagcgccaaggccatcctgggcggaagcaaggtgcgcgtggaccaaaagtgcaagtcatcggcccagatcgacccaactcccgtgatcgtcacctccaacaccaacatgtgcgcggtcatcgacggaaactcgaccaccttcgagcaccaacaaccactccaggaccggatgttcaagttcgagctcaccaagcgcctggagcacgactttggcaaggtcaccaagcaggaagtcaaagactttttccggtgggcgtcagatcacgtgaccgaggtgactcacgagttttacgtcagaaagggtggagctagaaagaggcccgcccccaatgacgcagatataagtgagcccaagcgggcctgtccgtcagttgcgcagccatcgacgtcagacgcggaagctccggtggactacgcggacagattggctagaggacaacctctctga

SEQ ID NO: 57 - DNA, 1872 bp, Adeno-associated virus 4; identical to SEQ ID NO: 55

SEQ ID NO: 58 - DNA, 1617 bp, Adeno-associated virus 4
  modified_base (162)..(162): a, c, t, or g
atgcgtgcagcagctggcggagctgcagtcgagggsggacaaggtgccgatggagtgggtaatgcctcgggtgattggcattgcgattccacctggtctgagggccacgtcacgaccaccagcaccagaacctgggtcttgcccacctacaacaaccacctntacaagcgactcggagagagcctgcagtccaacacctacaacggattctccaccccctggggatactttgacttcaaccgcttccactgccacttctcaccacgtgactggcagcgactcatcaacaacaactggggcatgcgacccaaagccatgcgggtcaaaatcttcaacatccaggtcaaggaggtcacgacgtcgaacggcgagacaacggtggctaataaccttaccagcacggttcagatctttgcggactcgtcgtacgaactgccgtacgtgatggatgcgggtcaagagggcagcctgcctccttttcccaacgacgtctttatggtgccccagtacggctactgtggactggtgaccggcaacacttcgcagcaacagactgacagaaatgccttctactgcctggagtactttccttcgcagatgctgcggactggcaacaactttgaaattacgtacagttttgagaaggtgcctttccactcgatgtacgcgcacagccagagcctggaccggctgatgaaccctctcatcgaccagtacctgtggggactgcaatcgaccaccaccggaaccaccctgaatgccgggactgccaccaccaactttaccaagctgcggcctaccaacttttccaactttaaaaagaactggctgcccgggccttcaatcaagcagcagggcttctcaaagactgccaatcaaaactacaagatccctgccaccgggtcagacagtctcatcaaatacgagacgcacagcactctggacggaagatggagtgccctgacccccggacctccaatggccacggctggacctgcggacagcaagttcagcaacagccagctcatctttgcggggcctaaacagaacggcaacacggccaccgtacccgggactctgatcttcacctctgaggaggagctggcagccaccaacgccaccgatacggacatgtggggcaacctacctggcggtgaccagagcaacagcaacctgccgaccgtggacagactgacagccttgggagccgtgcctggaatggtctggcaaaacagagacatttactaccagggtcccatttgggccaagattcctcataccgatggacactttcacccctcaccgctgattggtgggtttgggctgaaacacccgcctcctcaaatttttatcaagaacaccccggtacctgcgaatcctgcaacgaccttcagctctactccggtaaactccttcattactcagtacagcactggccaggtgtcggtgcagattgactgggagatccagaaggagcggtccaaacgctggaaccccgaggtccagtttacctccaactacggacagcaaaactctctgttgtgggctcccgatgcggctgggaaatacactgagcctagggctatcggtacccgctacctcacccaccacctgtaa

SEQ ID NO: 59 - DNA, 939 bp, Adeno-associated virus 4
atggagctggtcgggtggctggtggaccgcgggatcacgtcagaaaagcaatggatccaggaggaccaggcgtcctacatctccttcaacgccgcctccaactcgcggtcacaaatcaaggccgcgctggacaatgcctccaaaatcatgagcctgacaaagacggctccggactacctggtgggccagaacccgccggaggacatttccagcaaccgcatctaccgaatcctcgagatgaacgggtacgatccgcagtacgcggcctccgtcttcctgggctgggcgcaaaagaagttcgggaagaggaacaccatctggctctttgggccggccacgacgggtaaaaccaacatcgcggaagccatcgcccacgccgtgcccttctacggctgcgtgaactggaccaatgagaactttccgttcaacgattgcgtcgacaagatggtgatctggtgggaggagggcaagatgacggccaaggtcgtagagagcgccaaggccatcctgggcggaagcaaggtgcgcgtggaccaaaagtgcaagtcatcggcccagatcgacccaactcccgtgatcgtcacctccaacaccaacatgtgcgcggtcatcgacggaaactcgaccaccttcgagcaccaacaaccactccaggaccggatgttcaagttcgagctcaccaagcgcctggagcacgactttggcaaggtcaccaagcaggaagtcaaagactttttccggtgggcgtcagatcacgtgaccgaggtgactcacgagttttacgtcagaaagggtggagctagaaagaggcccgcccccaatgacgcagatataagtgagcccaagcgggcctgtccgtcagttgcgcagccatcgacgtcagacgcggaagctccggtggactacgcggacagattggctagaggacaacctctctga

SEQ ID NO: 60 - DNA, 1197 bp, Adeno-associated virus 4
atggagctggtcgggtggctggtggaccgcgggatcacgtcagaaaagcaatggatccaggaggaccaggcgtcctacatctccttcaacgccgcctccaactcgcggtcacaaatcaaggccgcgctggacaatgcctccaaaatcatgagcctgacaaagacggctccggactacctggtgggccagaacccgccggaggacatttccagcaaccgcatctaccgaatcctcgagatgaacgggtacgatccgcagtacgcggcctccgtcttcctgggctgggcgcaaaagaagttcgggaagaggaacaccatctggctctttgggccggccacgacgggtaaaaccaacatcgcggaagccatcgcccacgccgtgcccttctacggctgcgtgaactggaccaatgagaactttccgttcaacgattgcgtcgacaagatggtgatctggtgggaggagggcaagatgacggccaaggtcgtagagagcgccaaggccatcctgggcggaagcaaggtgcgcgtggaccaaaagtgcaagtcatcggcccagatcgacccaactcccgtgatcgtcacctccaacaccaacatgtgcgcggtcatcgacggaaactcgaccaccttcgagcaccaacaaccactccaggaccggatgttcaagttcgagctcaccaagcgcctggagcacgactttggcaaggtcaccaagcaggaagtcaaagactttttccggtgggcgtcagatcacgtgaccgaggtgactcacgagttttacgtcagaaagggtggagctagaaagaggcccgcccccaatgacgcagatataagtgagcccaagcgggcctgtccgtcagttgcgcagccatcgacgtcagacgcggaagctccggtggactacgcggacaggtaccaaaacaaatgttctcgtcacgtgggtatgaatctgatgctttttccctgccggcaatgcgagagaatgaatcagaatgtggacatttgcttcacgcacggggtcatggactgtgccgagtgcttccccgtgtcagaatctcaacccgtgtctgtcgtcagaaagcggacgtatcagaaactgtgtccgattcatcacatcatggggagggcgcccgaggtggcctgctcggcctgcgaactggccaatgtggacttggatgactgtgacatggaacaa

SEQ ID NO: 61 - DNA, 245 bp, Adeno-associated virus 4
ctccatcatctaggtttgcccactgacgtcaatgtgacgtcctagggttagggaggtccctgtattagcagtcacgtgagtgtcgtatttcgcggagcgtagcggagcgcataccaagctgccacgtcacagccacgtggtccgtttgcgacagtttgcgacaccatgtggtcaggagggtatataaccgcgagtgagccagcgaggagctccattttgcccgcgaattttgaacgagcagcagc

SEQ ID NO: 62 - protein, 313 aa, Adeno-associated virus 4
  MOD_RES (313)..(313): Any amino acid
MELVGWLVDRGITSEKQWIQEDQASYISFNAASNSRSQIKAALDNASKIMSLTKTAPDYLVGQNPPEDISSNRIYRILEMNGYDPQYAASVFLGWAQKKFGKRNTIWLFGPATTGKTNIAEAIAHAVPFYGCVNWTNENFPFNDCVDKMVIWWEEGKMTAKVVESAKAILGGSKVRVDQKCKSSAQIDPTPVIVTSNTNMCAVIDGNSTTFEHQQPLQDRMFKFELTKRLEHDFGKVTKQEVKDFFRWASDHVTEVTHEFYVRKGGARKRPAPNDADISEPKRACPSVAQPSTSDAEAPVDYADRLARGQPLX

SEQ ID NO: 63 - protein, 399 aa, Adeno-associated virus 4
MELVGWLVDRGITSEKQWIQEDQASYISFNAASNSRSQIKAALDNASKIMSLTKTAPDYLVGQNPPEDISSNRIYRILEMNGYDPQYAASVFLGWAQKKFGKRNTIWLFGPATTGKTNIAEAIAHAVPFYGCVNWTNENFPFNDCVDKMVIWWEEGKMTAKVVESAKAILGGSKVRVDQKCKSSAQIDPTPVIVTSNTNMCAVIDGNSTTFEHQQPLQDRMFKFELTKRLEHDFGKVTKQEVKDFFRWASDHVTEVTHEFYVRKGGARKRPAPNDADISEPKRACPSVAQPSTSDAEAPVDYADRYQNKCSRHVGMNLMLFPCRQCERMNQNVDICFTHGVMDCAECFPVSESQPVSVVRKRTYQKLCPIHHIMGRAPEVACSACELANVDLDDCDMEQ

SEQ ID NO: 64 - protein, 623 aa, Adeno-associated virus 4
MPGFYEIVLKVPSDLDEHLPGISDSFVSWVAEKEWELPPDSDMDLNLIEQAPLTVAEKLQREFLVEWRRVSKAPEALFFVQFEKGDSYFHLHILVETVGVKSMVVGRYVSQIKEKLVTRIYRGVEPQLPNWFAVTKTRNGAGGGNKVVDDCYIPNYLLPKTQPELQWAWTNMDQYISACLNLAERKRLVAQHLTHVSQTQEQNKENQNPNSDAPVIRSKTSARYMELVGWLVDRGITSEKQWIQEDQASYISFNAASNSRSQIKAALDNASKIMSLTKTAPDYLVGQNPPEDISSNRIYRILEMNGYDPQYAASVFLGWAQKKFGKRNTIWLFGPATTGKTNIAEAIAHAVPFYGCVNWTNENFPFNDCVDKMVIWWEEGKMTAKVVESAKAILGGSKVRVDQKCKSSAQIDPTPVIVTSNTNMCAVIDGNSTTFEHQQPLQDRMFKFELTKRLEHDFGKVTKQEVKDFFRWASDHVTEVTHEFYVRKGGARKRPAPNDADISEPKRACPSVAQPSTSDAEAPVDYADRYQNKCSRHVGMNLMLFPCRQCERMNQNVDICFTHGVMDCAECFPVSESQPVSVVRKRTYQKLCPIHHIMGRAPEVACSACELANVDLDDCDMEQ

SEQ ID NO: 65 - protein, 537 aa, Adeno-associated virus 4
  MOD_RES (537)..(537): Any amino acid
MPGFYEIVLKVPSDLDEHLPGISDSFVSWVAEKEWELPPDSDMDLNLIEQAPLTVAEKLQREFLVEWRRVSKAPEALFFVQFEKGDSYFHLHILVETVGVKSMVVGRYVSQIKEKLVTRIYRGVEPQLPNWFAVTKTRNGAGGGNKVVDDCYIPNYLLPKTQPELQWAWTNMDQYISACLNLAERKRLVAQHLTHVSQTQEQNKENQNPNSDAPVIRSKTSARYMELVGWLVDRGITSEKQWIQEDQASYISFNAASNSRSQIKAALDNASKIMSLTKTAPDYLVGQNPPEDISSNRIYRILEMNGYDPQYAASVFLGWAQKKFGKRNTIWLFGPATTGKTNIAEAIAHAVPFYGCVNWTNENFPFNDCVDKMVIWWEEGKMTAKVVESAKAILGGSKVRVDQKCKSSAQIDPTPVIVTSNTNMCAVIDGNSTTFEHQQPLQDRMFKFELTKRLEHDFGKVTKQEVKDFFRWASDHVTEVTHEFYVRKGGARKRPAPNDADISEPKRACPSVAQPSTSDAEAPVDYADRLARGQPLX

SEQ ID NO: 66 - protein, 623 aa, Adeno-associated virus 4; identical to SEQ ID NO: 64

SEQ ID NO: 67 - protein, 544 aa, Adeno-associated virus 4
MSDDSEMRAAAGGAAVEGGQGADGVGNASGDWHCDSTWSEGHVTTTSTRTWVLPTYNNHLYKRLGESLQSNTYNGFSTPWGYFDFNRFHCHFSPRDWQRLINNNWGMRPKAMRVKIFNIQVKEVTTSNGETTVANNLTSTVQIFADSSYELPYVMDAGQEGSLPPFPNDVFMVPQYGYCGLVTGNTSQQQTDRNAFYCLEYFPSQMLRTGNNFEITYSFEKVPFHSMYAHSQSLDRLMNPLIDQYLWGLQSTTTGTTLNAGTATTNFTKLRPTNFSNFKKNWLPGPSIKQQGFSKTANQNYKIPATGSDSLIKYETHSTLDGRWSALTPGPPMATAGPADSKFSNSQLIFAGPKQNGNTATVPGTLIFTSEEELAATNATDTDMWGNLPGGDQSNSNLPTVDRLTALGAVPGMVWQNRDIYYQGPIWAKIPHTDGHFHPSPLIGGFGLKHPPPQIFIKNTPVPANPATTFSSTPVNSFITQYSTGQVSVQIDWEIQKERSKRWNPEVQFTSNYGQQNSLLWAPDAAGKYTEPRAIGTRYLTHHL

SEQ ID NO: 68 - protein, 734 aa, Adeno-associated virus 4
MTDGYLPDWLEDNLSEGVREWWALQPGAPKPKANQQHQDNARGLVLPGYKYLGPGNGLDKGEPVNAADAAALEHDKAYDQQLKAGDNPYLKYNHADAEFQQRLQGDTSFGGNLGRAVFQAKKRVLEPLGLVEQAGETAPGKKRPLIESPQQPDSSTGIGKKGKQPAKKKLVFEDETGAGDGPPEGSTSGAMSDDSEMRAAAGGAAVEGGQGADGVGNASGDWHCDSTWSEGHVTTTSTRTWVLPTYNNHLYKRLGESLQSNTYNGFSTPWGYFDFNRFHCHFSPRDWQRLINNNWGMRPKAMRVKIFNIQVKEVTTSNGETTVANNLTSTVQIFADSSYELPYVMDAGQEGSLPPFPNDVFMVPQYGYCGLVTGNTSQQQTDRNAFYCLEYFPSQMLRTGNNFEITYSFEKVPFHSMYAHSQSLDRLMNPLIDQYLWGLQSTTTGTTLNAGTATTNFTKLRPTNFSNFKKNWLPGPSIKQQGFSKTANQNYKIPATGSDSLIKYETHSTLDGRWSALTPGPPMATAGPADSKFSNSQLIFAGPKQNGNTATVPGTLIFTSEEELAATNATDTDMWGNLPGGDQSNSNLPTVDRLTALGAVPGMVWQNRDIYYQGPIWAKIPHTDGHFHPSPLIGGFGLKHPPPQIFIKNTPVPANPATTFSSTPVNSFITQYSTGQVSVQIDWEIQKERSKRWNPEVQFTSNYGQQNSLLWAPDAAGKYTEPRAIGTRYLTHHL

SEQ ID NO: 69 - protein, 598 aa, Adeno-associated virus 4
TAPGKKRPLIESPQQPDSSTGIGKKGKQPAKKKLVFEDETGAGDGPPEGSTSGAMSDDSEMRAAAGGAAVEGGQGADGVGNASGDWHCDSTWSEGHVTTTSTRTWVLPTYNNHLYKRLGESLQSNTYNGFSTPWGYFDFNRFHCHFSPRDWQRLINNNWGMRPKAMRVKIFNIQVKEVTTSNGETTVANNLTSTVQIFADSSYELPYVMDAGQEGSLPPFPNDVFMVPQYGYCGLVTGNTSQQQTDRNAFYCLEYFPSQMLRTGNNFEITYSFEKVPFHSMYAHSQSLDRLMNPLIDQYLWGLQSTTTGTTLNAGTATTNFTKLRPTNFSNFKKNWLPGPSIKQQGFSKTANQNYKIPATGSDSLIKYETHSTLDGRWSALTPGPPMATAGPADSKFSNSQLIFAGPKQNGNTATVPGTLIFTSEEELAATNATDTDMWGNLPGGDQSNSNLPTVDRLTALGAVPGMVWQNRDIYYQGPIWAKIPHTDGHFHPSPLIGGFGLKHPPPQIFIKNTPVPANPATTFSSTPVNSFITQYSTGQVSVQIDWEIQKERSKRWNPEVQFTSNYGQQNSLLWAPDAAGKYTEPRAIGTRYLTHHL

SEQ ID NO: 70 - DNA, 129 bp, Adeno-associated virus 4
ttggccactccctctatgcgcgctcgctcactcactcggccctgcggccagaggccggcagtctggagacctttggtgtccagggcagggccgagtgagtgagcgagcgcgcatagagggagtggccaa

SEQ ID NO: 71 - DNA, 125 bp, Adeno-associated virus 4
ttggccactccctctatgcgcgctcgctcactcactcggccctggagaccaaaggtctccagactgccggcctctggccggcagggccgagtgagtgagcgagcgcgcatagagggagtggccaa

SEQ ID NO: 72 - DNA, 4768 bp, Adeno-associated virus 4
  modified_base (3009)..(3009): a, c, t, or g
ttggccactccctctatgcgcgctcgctcactcactcggccctggagaccaaaggtctccagactgccggcctctggccggcagggccgagtgagtgagcgagcgcgcatagagggagtggccaactccatcatctaggtttgcccactgacgtcaatgtgacgtcctagggttagggaggtccctgtattagcagtcacgtgagtgtcgtatttcgcggagcgtagcggagcgcataccaagctgccacgtcacagccacgtggtccgtttgcgacagtttgcgacaccatgtggtcaggagggtatataaccgcgagtgagccagcgaggagctccattttgcccgcgaattttgaacgagcagcagccatgccggggttctacgagatcgtgctgaaggtgcccagcgacctggacgagcacctgcccggcatttctgactcttttgtgagctgggtggccgagaaggaatgggagctgccgccggattctgacatggacttgaatctgattgagcaggcacccctgaccgtggccgaaaagctgcaacgcgagttcctggtcgagtggcgccgcgtgagtaaggccccggaggccctcttctttgtccagttcgagaagggggacagctacttccacctgcacatcctggtggagaccgtgggcgtcaaatccatggtggtgggccgctacgtgagccagattaaagagaagctggtgacccgcatctaccgcggggtcgagccgcagcttccgaactggttcgcggtgaccaagacgcgtaatggcgccggaggcgggaacaaggtggtggacgactgctacatccccaactacctgctccccaagacccagcccgagctccagtgggcgtggactaacatggaccagtatataagcgcctgtttgaatctcgcggagcgtaaacggctggtggcgcagcatctgacgcacgtgtcgcagacgcaggagcagaacaaggaaaaccagaaccccaattctgacgcgccggtcatcaggtcaaaaacctccgccaggtacatggagctggtcgggtggctggtggaccgcgggatcacgtcagaaaagcaatggatccaggaggaccaggcgtcctacatctccttcaacgccgcctccaactcgcggtcacaaatcaaggccgcgctggacaatgcctccaaaatcatgagcctgacaaagacggctccggactacctggtgggccagaacccgccggaggacatttccagcaaccgcatctaccgaatcctcgagatgaacgggtacgatccgcagtacgcggcctccgtcttcctgggctgggcgcaaaagaagttcgggaagaggaacaccatctggctctttgggccggccacgacgggtaaaaccaacatcgcggaagccatcgcccacgccgtgcccttctacggctgcgtgaactggaccaatgagaactttccgttcaacgattgcgtcgacaagatggtgatctggtgggaggagggcaagatgacggccaaggtcgtagagagcgccaaggccatcctgggcggaagcaaggtgcgcgtggaccaaaagtgcaagtcatcggcccagatcgacccaactcccgtgatcgtcacctccaacaccaacatgtgcgcggtcatcgacggaaactcgaccaccttcgagcaccaacaaccactccaggaccggatgttcaagttcgagctcaccaagcgcctggagcacgactttggcaaggtcaccaagcaggaagtcaaagactttttccggtgggcgtcagatcacgtgaccgaggtgactcacgagttttacgtcagaaagggtggagctagaaagaggcccgcccccaatgacgcagatataagtgagcccaagcgggcctgtccgtcagttgcgcagccatcgacgtcagacgcggaagctccggtggactacgcggacaggtaccaaaacaaatgttctcgtcacgtgggtatgaatctgatgctttttccctgccggcaatgcgagagaatgaatcagaatgtggacatttgcttcacgcacggggtcatggactgtgccgagtgcttccccgtgtcagaatctcaacccgtgtctgtcgtcagaaagcggacgtatcagaaactgtgtccgattcatcacatcatggggagggcgcccgaggtggcctgctcggcctgcgaactggccaatgtggacttggatgactgtgacatggaacaataaatgactcaaaccagatatgactgacggttaccttccagattggctagaggacaacctctctgaaggcgttcgagagtggtgggcgctgcaacctggagcccctaaacccaaggcaaatcaacaacatcaggacaacgctcggggtcttgtgcttccgggttacaaatacctcggacccggcaacggactcgacaagggggaacccgtcaacgcagcggacgcggcagccctcgagcacgacaaggcctacgaccagcagctcaaggccggtgacaacccctacctcaagtacaaccacgccgacgcggagttccagcagcggcttcagggcgacacaccgtttgggggcaacctcggcagagcagtcttccaggccaaaaagagggttcttgaacctcttggtctggttgagcaagcgggtgagacggctcctggaaagaagagaccgttgattgaatccccccagcagcccgactcctccacgggtatcggcaaaaaaggcaagcagccggctaaaaagaagctcgttttcgaagacgaaactggagcaggcgacggaccccctgagggatcaacttccggagccatgtctgatgacagtgagatgcgtgcagcagctggcggagctgcagtcgagggsggacaaggtgccgatggagtgggtaatgcctcgggtgattggcattgcgattccacctggtctgagggccacgtcacgaccaccagcaccagaacctgggtcttgcccacctacaacaaccacctntacaagcgactcggagagagcctgcagtccaacacctacaacggattctccaccccctggggatactttgacttcaaccgcttccactgccacttctcaccacgtgactggcagcgactcatcaacaacaactggggcatgcgacccaaagccatgcgggtcaaaatcttcaacatccaggtcaaggaggtcacgacgtcgaacggcgagacaacggtggctaataaccttaccagcacggttcagatctttgcggactcgtcgtacgaactgccgtacgtgatggatgcgggtcaagagggcagcctgcctccttttcccaacgacgtctttatggtgccccagtacggctactgtggactggtgaccggcaacacttcgcagcaacagactgacagaaatgccttctactgcctggagtactttccttcgcagatgctgcggactggcaacaactttgaaattacgtacagttttgagaaggtgcctttccactcgatgtacgcgcacagccagagcctggaccggctgatgaaccctctcatcgaccagtacctgtggggactgcaatcgaccaccaccggaaccaccctgaatgccgggactgccaccaccaactttaccaagctgcggcctaccaacttttccaactttaaaaagaactggctgcccgggccttcaatcaagcagcagggcttctcaaagactgccaatcaaaactacaagatccctgccaccgggtcagacagtctcatcaaatacgagacgcacagcactctggacggaagatggagtgccctgacccccggacctccaatggccacggctggacctgcggacagcaagttcagcaacagccagctcatctttgcggggcctaaacagaacggcaacacggccaccgtacccgggactctgatcttcacctctgaggaggagctggcagccaccaacgccaccgatacggacatgtggggcaacctacctggcggtgaccagagcaacagcaacctgccgaccgtggacagactgacagccttgggagccgtgcctggaatggtctggcaaaacagagacatttactaccagggtcccatttgggccaagattcctcataccgatggacactttcacccctcaccgctgattggtgggtttgggctgaaacacccgcctcctcaaatttttatcaagaacaccccggtacctgcgaatcctgcaacgaccttcagctctactccggtaaactccttcattactcagtacagcactggccaggtgtcggtgcagattgactgggagatccagaaggagcggtccaaacgctggaaccccgaggtccagtttacctccaactacggacagcaaaactctctgttgtgggctcccgatgcggctgggaaatacactgagcctagggctatcggtacccgctacctcacccaccacctgtaataacctgttaatcaataaaccggtttattcgtttcagttgaactttggtctccgtgtccttcttatcttatctcgtttccatggctactgcgtacataagcagcggcctgcggcgcttgcgcttcgcggtttacaactgccggttaatcagtaacttctggcaaaccatgatgatggagttggccactccctctatgcgcgctcgctcactcactcggccctggagaccaaaggtctccagactgccggcctctggccggcagggccgagtgagtgagcgagcgcgcatagagggagtggccaa

SEQ ID NO: 73 - DNA, 3098 bp, Artificial Sequence
  source: /note="Description of Artificial Sequence: Synthetic polynucleotide"
gaattcgccctttctacggctgcgtcaactggaccaatgagaactttcccttcaacgattgcgtcgacaagatggtgatctggtgggaggagggcaagatgacggccaaggtcgtggagtccgccaaggccattctcggcggcagcaaggtgcgcgtggaccaaaagtgcaagtcttccgcccagatcgatcccacccccgtgatcgtcacttccaacaccaacatgtgcgctgtgattgacgggaacagcaccaccttcgagcaccagcagccgttacaagaccggatgttcaaatttgaactcacccgccgtctggagcacgactttggcaaggtgacaaagcaggaagtcaaagagttcttccgctgggcgcaggatcacgtgaccgaggtggcgcatgagttctacgtcagaaagggtggagccaacaagagacccgcccccgatgacgcggataaaagcgagcccaagcgggcctgcccctcagtcgcggatccatcgacgtcagacgcggaaggagctccggtggactttgccgacaggtaccaaaacaaatgttctcgtcacgcgggcatgcttcagatgctgtttccctgcaagacatgcgagagaatgaatcagaatttcaacatttgcttcacgcacgggaccagagactgttcagaatgtttccccggcgtgtcagaatctcaaccggtcgtcagaaagaggacgtatcggaaactctgtgccattcatcatctgctggggcgggctcccgagattgcttgctcggcctgcgatctggtcaacgtggacctggatgaccgtgtttctgagcaataaatgacttaaaccaggtatggctgccgatggttatcttccagattggctcgaggacaacctctctgagggcattcgcgagtggtgggacttgaaacctggagccccgaaacccaaagccaaccagcaaaagcaggacgacggccggggtctggtgcttcctggctacaagtacctcggacccttcaacggactcgacaagggagagccggtcaacgaggcagacgccgcggccctcgagcacgacaaggcctacgacaagcagctcgagcagggggacaacccgtacctcaagtacaaccacgccgacgccgagtttcaggagcgtcttcaagaagatacgtcttttgggggcaacctcgggcgagcagtcttccaggccaagaagcgggttctcgaacctctcggtctggttgaggaaggcgctaagacggctcctggaaagaagagacccatagaatcccccgactcctccacgggcatcggcaagaaaggccagcagcccgctaaaaagaagctcaactttgggcagactggcgactcagagtcagtgcccgacccccaacctctcggagaacctcccgccgcgccctcaggtctgggatctggtacaatggctgcaggcggtggcgcaccaatggcagacaataacgaaggcgccgacggagtgggtaatgcctccggaaattggcattgcgattccacatggctgggcgacagagtcatcaccaccagcacccgcacctgggccctgcccacctacaacaaccacctctacaagcagatatcaagtcagagcggggctaccaacgacaaccacttcttcggctacagcaccccctggggctattttgacttcaacagattccactgccacttctcaccacgtgactggcagcgactcatcaacaacaactggggattccggcccagaaagctgcggttcaagttgttcaacatccaggtcaaggaggtcacgacgaacgacggcgttacgaccatcgctaataaccttaccagcacgattcaggtcttctcggactcggagtaccaactgccgtacgtcctcggctctgcgcaccagggctgcctccctccgttccctgcggacgtgttcatgattcctcagtacggatatctgactctaaacaacggcagtcagtctgtgggacgttcctccttctactgcctggagtactttccttctcagatgctgagaacgggcaataactttgaattcagctacacctttgaggaagtgcctttccacagcagctatgcgcacagccagagcctggaccggctgatgaatcccctcatcgaccagtacctgtactacctggcccggacccagagcactacggggtccacaagggagctgcagttccatcaggctgggcccaacaccatggccgagcaatcaaagaactggctgcccggaccctgttatcggcagcagagactgtcaaaaaacatagacagcaacaacaacagtaactttgcctggaccggggccactaaataccatctgaatggtagaaattcattaaccaacccgggcgtagccatggccaccaacaaggacgacgaggaccagttctttcccatcaacggagtgctggtttttggcgaaacgggggctgccaacaagacaacgctggaaaacgtgctaatgaccagcgaggaggagatcaaaaccaccaatcccgtggctacagaagaatacggtgtggtctccagcaacctgcaatcgtctacggccggaccccagacacagactgtcaacagccagggggctctgcccggcatggtctggcagaaccgggacgtgtacctgcagggtcccatctgggccaaaattcctcacacggacggcaactttcacccgtctcccctgatgggcggatttggactcaaacacccgcctcctcaaattctcatcaaaaacaccccggtacctgctaatcctccagaggtgtttactcctgccaagtttgcctcatttatcacgcagtacagcaccggccaggtcagcgtggagatcgagtgggaactgcagaaagaaaacagcaaacgctggaatccagagattcagtacacctcaaattatgccaagtctaataatgtggaatttgctgtcaacaacgaaggggtttatactgagcctcgccccattggcacccgttacctcacccgtaacctgtaattgcctgttaatcaataaaccggttaattcgtttcagttgaactttggtctctgcgaagggcgaattc

SEQ ID NO: 74 - protein, 728 aa, Artificial Sequence
  source: /note="Description of Artificial Sequence: Synthetic polypeptide"
MAADGYLPDWLEDNLSEGIREWWDLKPGAPKPKANQQKQDDGRGLVLPGYKYLGPFNGLDKGEPVNEADAAALEHDKAYDKQLEQGDNPYLKYNHADAEFQERLQEDTSFGGNLGRAVFQAKKRVLEPLGLVEEGAKTAPGKKRPIESPDSSTGIGKKGQQPAKKKLNFGQTGDSESVPDPQPLGEPPAAPSGLGSGTMAAGGGAPMADNNEGADGVGNASGNWHCDSTWLGDRVITTSTRTWALPTYNNHLYKQISSQSGATNDNHFFGYSTPWGYFDFNRFHCHFSPRDWQRLINNNWGFRPRKLRFKLFNIQVKEVTTNDGVTTIANNLTSTIQVFSDSEYQLPYVLGSAHQGCLPPFPADVFMIPQYGYLTLNNGSQSVGRSSFYCLEYFPSQMLRTGNNFEFSYTFEEVPFHSSYAHSQSLDRLMNPLIDQYLYYLARTQSTTGSTRELQFHQAGPNTMAEQSKNWLPGPCYRQQRLSKNIDSNNNSNFAWTGATKYHLNGRNSLTNPGVAMATNKDDEDQFFPINGVLVFGETGAANKTTLENVLMTSEEEIKTTNPVATEEYGVVSSNLQSSTAGPQTQTVNSQGALPGMVWQNRDVYLQGPIWAKIPHTDGNFHPSPLMGGFGLKHPPPQILIKNTPVPANPPEVFTPAKFASFITQYSTGQVSVEIEWELQKENSKRWNPEIQYTSNYAKSNNVEFAVNNEGVYTEPRPIGTRYLTRNL

SEQ ID NO: 75 - DNA, 2495 bp, Artificial Sequence
  source: /note="Description of Artificial Sequence: Synthetic polynucleotide"
gaattcgccctttctacggctgcgtcaactagaccaatgagaactttcccttcaacgattgcgtcgacaagatggtgatctggtgggaggagggcaagatgacggccaaggtcgtggagtccgccaaggccattcatcatctgctggggcgggctcccgagattgcttgctcggcctgcgatctggtcaacgtggacctggatgactgtgtttctgagcaataaatgacttaaaccaggtatggctgccgatggttatcttccagattggctcgaggacaacctctctgagggcattcgcgagtggtgggacttgaaacctggagccccgaaacccaaagccaaccagcaaaagcaggacgacggccggggtctggtgcttcctggctacaagtacctcggacccttcaacggactcgacaagggagagccggtcaacgaggcagacgccgcggccctcgagcacgacaaggcctacgacaagcagctcgagcagggggacaacccgtacctcaagtacaaccacgccgacgccgagtttcaggagcgtcttcaagaagatacgtcttttgggggcaacctcgggcgagcagtcttccaggccaagaagcgggttctcgaacctctcggtctggttgaggaaggcgctaagacggctcctggaaagaagagacccatagaatcccccgactcctccacgggcatcggcaagaaaggccagcagcccgctaaaaagaagctcaactttgggcagactggcgactcagagtcagtgcccgaccctcaaccaatcggagaaccccccgcaggcccctctggtctgggatctggtacaatggctgcaggcggtggcgctccaatggcagacaataacgaaggcgccgacggagtgggtaatgcctccggaaattggcattgcgattccacatggctgggcgacagagtcatcaccaccagcacccgcacctgggccctgcccacctacaacaaccacctctacaagcagatatcaagtcagagcggggctaccaacgacaaccacttcttcggctacagcaccccctggggctattttgacttcaacagattccactgccacttctcaccacgtgactggcagcgactcatcaacaacaactggggattccggcccagaaagctgcggttcaagttgttcaacatccaggtcaaggaggtcacgacgaacgacggcgttacgaccatcgctaataaccttaccagcacgattcaggtcttctcggactcggagtaccaactgccgtacgtcctcggctctgcgcaccagggctgcctccctccgttccctgcggacgtgttcatgattcctcagtacggatatctgactctaaacaacggcagtcagtctgtgggacgttcctccttctactgcctggagtactttccttctcagatgctgagaacgggcaataactttgaattcagctacacctttgaggaagtgcctttccacagcagctatgcgcacagccagagcctggaccggctgatgaatcccctcatcgaccagtacctgtactacctggcccggacccagagcactacggggtccacaagggagctgcagttccatcaggctgggcccaacaccatggccgagcaatcaaagaactggctgcccggaccctgttatcggcagcagagactgtcaaaaaacatagacagcaacaacaccagtaactttgcctggaccggggccactaaataccatctgaatggtagaaattcattaaccaacccgggcgtagccatggccaccaacaaggacgacgaggaccagttctttcccatcaacggagtgctggtttttggcaaaacgggggctgccaacaagacaacgctggaaaacgtgctaatgaccagcgaggaggagatcaaaaccaccaatcccgtggctacagaacagtacggtgtggtctccagcaacctgcaatcgtctacggccggaccccagacacagactgtcaacagccagggggctctgcccggcatggtctggcagaaccgggacgtgtacctgcagggtcccatctgggccaaaattcctcacacggacggcaactttcacccgtctcccctgatgggcggatttggactcaaacacccgcctcctcaaattctcatcaaaaacaccccggtacctgctaatcctccagaggtgtttactcctgccaagtttgcctcatttatcacgcagtacagcaccggccaggtcagcgtggagatcgagtgggaactgcagaaagaaaacagcaaacgctggaatccagagattcagtacacctcaaattatgccaagtctaataatgtggaatttgctgtcaacaacgaaggggtttatactgagcctcgccccattggcacccgttacctcacccgtaacctgtaattgcctgttaatcaataaaccggttaattcgtttcagttgaactttggtctctgcgaagggcgaattc

SEQ ID NO: 76 - protein, 728 aa, Artificial Sequence
  source: /note="Description of Artificial Sequence: Synthetic polypeptide"
MAADGYLPDWLEDNLSEGIREWWDLKPGAPKPKANQQKQDDGRGLVLPGYKYLGPFNGLDKGEPVNEADAAALEHDKAYDKQLEQGDNPYLKYNHADAEFQERLQEDTSFGGNLGRAVFQAKKRVLEPLGLVEEGAKTAPGKKRPIESPDSSTGIGKKGQQPAKKKLNFGQTGDSESVPDPQPIGEPPAGPSGLGSGTMAAGGGAPMADNNEGADGVGNASGNWHCDSTWLGDRVITTSTRTWALPTYNNHLYKQISSQSGATNDNHFFGYSTPWGYFDFNRFHCHFSPRDWQRLINNNWGFRPRKLRFKLFNIQVKEVTTNDGVTTIANNLTSTIQVFSDSEYQLPYVLGSAHQGCLPPFPADVFMIPQYGYLTLNNGSQSVGRSSFYCLEYFPSQMLRTGNNFEFSYTFEEVPFHSSYAHSQSLDRLMNPLIDQYLYYLARTQSTTGSTRELQFHQAGPNTMAEQSKNWLPGPCYRQQRLSKNIDSNNTSNFAWTGATKYHLNGRNSLTNPGVAMATNKDDEDQFFPINGVLVFGKTGAANKTTLENVLMTSEEEIKTTNPVATEQYGVVSSNLQSSTAGPQTQTVNSQGALPGMVWQNRDVYLQGPIWAKIPHTDGNFHPSPLMGGFGLKHPPPQILIKNTPVPANPPEVFTPAKFASFITQYSTGQVSVEIEWELQKENSKRWNPEIQYTSNYAKSNNVEFAVNNEGVYTEPRPIGTRYLTRNL

SEQ ID NO: 77 - DNA, 2504 bp, Artificial Sequence
  source: /note="Description of Artificial Sequence: Synthetic polynucleotide"
gaattcgccctttctacggctgcgtcaactggaccaatgagaactttcccttcaacgattgcgtcgacaagatggtgatctggtgggaggagggcaagatgacggccaaggtcgtggagtccgccaaggccattcatcatctgctggggcgggctcccgagattgcttgctcggcctgcgatctggtcaacgtggacctggatgactgtgtttctgagcaataaatgacttaaaccaggtatggctgccgatggttatcttccagattggctcgaggacaacctctctgagggcattcgcgagtggtgggacttgaaacctggagccccgaaacccaaagccaaccagcaaaagcaggacgacggccggggtctggtgcttcctggctacaagtacctcggacccttcaacggactcgacaagggagagccggtcaacgaggcagacgccgcggccctcgagcacgacaaggcctacgacaagcagctcgagcagggggacaacccgtacctcaagtacaaccacgccgacgccgagtttcaggagcgtcttcaagaagatacgtcttttgggggcaacctcgggcgagcagtcttccaggccaagaagcgggttctcgaacctctcggtctggttgaggaaggcgctaagacggctcctggaaagaagagacccatagaatcccccgactcctccacgggcatcggcaagaaaggccagcagcccgctaaaaagaagctcaactttgggcagactggcgactcagagtcagtgcccgaccctcaaccaatcggagaaccccccgcaggcccctctggtctgggatctggtacaatggctgcaggcggtggcgctccaatggcagacaataacgaaggcgccgacggagtgggtaatgcctccggaaattggcattgcgattccacatggctgggcgacagagtcatcaccaccagcacccgcacctgggccctgcccacctacaacaaccacctctacaagcagatatcaagtcagagcggggctaccaacgacaaccacttcttcggctacagcaccccctggggctattttgacttcaacagattccactgccacttctcatcacgtgactggcagcgactcatcaacaacaactggggattccggcccaagagactcaacttcaagctcttcaacatccaggtcaaggaggtcacgcagaatgaaggcaccaagaccatcgccaataaccttaccagcacgattcaggtctttacggactcggaataccggctcccgtacgtcctcggctctgcgcaccagggctgcctgcctccgttcccggcggacgtcttcatgattcctcagtacgggtacctgactctgaacaacggcagtcaggccgtgggccgttcctccttctactgcctggagtactttccttctcaaatgctgagaacgggcaacaactttgagttcagctaccagtttgaggacgtgccttttcacagcagctacgcgcacagccaaagcctggaccggctgatgaaccccctcatcgaccagtacctgtactacctgtctcggactcagtccacgggaggtaccgcaggaactcagcagttgctattttctcaggccgggcctaataacatgtcggctcaggccaaaaactggctacccgggccctgctaccggcagcaacgcgtctccacgacactgtcgcaaaataacaacagcaactttgcttggaccggtgccaccaagtatcatctgaatggcagagactctctggtaaatcccggtgtcgctatggcaacgcacaaggacgacgaagagcgattttttccatccagcggagtcttgatgtttgggaaacagggagctggaaaagacaacgtggactatagcagcgttatgctaaccagtgaggaagaaatcaaaaccaccaacccagtggccacagaacagtacggcgtggtggccgataacctgcaacagcaaaacgccgctcctattgtaggggccgtcaacagtcaaggagccttacctggcatggtctggcagaaccgggacgtgtacctgcagggtcctatctgggccaagattcctcacacggacggcaactttcatccttcgccgctgatgggaggctttggactgaaacacccgcctcctcagatcctgattaagaatacacctgttcccgcggatcctccaactaccttcagtcaagccaagccggcgtcgttcatcacgcagtacagcaccggacaggtcagcgtggaaattgaatgggagctgcagaaagagaacagcaagcgctggaacccagagattcagtatacttccaactactacaaatctacaaatgtggactttgctgtcaatactgagggtacttattcagagcctcgccccattggcacccgttacctcacccgtaacctgtaattgcctgttaatcaataaaccggttaattcgtttcagttgaactttggtctctgcgaagggcgaattc

SEQ ID NO: 78 - protein, 731 aa, Artificial Sequence
  source: /note="Description of Artificial Sequence: Synthetic polypeptide"
MAADGYLPDWLEDNLSEGIREWWDLKPGAPKPKANQQKQDDGRGLVLPGYKYLGPFNGLDKGEPVNEADAAALEHDKAYDKQLEQGDNPYLKYNHADAEFQERLQEDTSFGGNLGRAVFQAKKRVLEPLGLVEEGAKTAPGKKRPIESPDSSTGIGKKGQQPAKKKLNFGQTGDSESVPDPQPIGEPPAGPSGLGSGTMAAGGGAPMADNNEGADGVGNASGNWHCDSTWLGDRVITTSTRTWALPTYNNHLYKQISSQSGATNDNHFFGYSTPWGYFDFNRFHCHFSSRDWQRLINNNWGFRPKRLNFKLFNIQVKEVTQNEGTKTIANNLTSTIQVFTDSEYRLPYVLGSAHQGCLPPFPADVFMIPQYGYLTLNNGSQAVGRSSFYCLEYFPSQMLRTGNNFEFSYQFEDVPFHSSYAHSQSLDRLMNPLIDQYLYYLSRTQSTGGTAGTQQLLFSQAGPNNMSAQAKNWLPGPCYRQQRVSTTLSQNNNSNFAWTGATKYHLNGRDSLVNPGVAMATHKDDEERFFPSSGVLMFGKQGAGKDNVDYSSVMLTSEEEIKTTNPVATEQYGVVADNLQQQNAAPIVGAVNSQGALPGMVWQNRDVYLQGPIWAKIPHTDGNFHPSPLMGGFGLKHPPPQILIKNTPVPADPPTTFSQAKPASFITQYSTGQVSVEIEWELQKENSKRWNPEIQYTSNYYKSTNVDFAVNTEGTYSEPRPIGTRYLTRNL

SEQ ID NO: 79 - DNA, 3128 bp, Artificial Sequence
  source: /note="Description of Artificial Sequence: Synthetic polynucleotide"
gaattcgccctttctacggctgcgtcaactggaccaatgagaactttcccttcaacgattgcgtcgacaagatggtgatctggtgggaggagggcaagatgacggccaaggtcgtggagtccgccaaggccattctcggcggcagcaaggtgcgcgtggaccaaaagtgcaagtcttccgcccagatcgatcccacccccgtgatcgtcacttccaacaccaacatgtgcgccgtgattgacgggaacagcaccaccttcgagcaccagcagccgttacaagaccggatgttcaaatttgaactcacccgccgtctggagcacgactttggcaaggtgacaaagcaggaagtcaaagagttcttccgctgggcgcaggatcacgtgaccgaggtggcgcatgagttctacgtcagaaagggtggagccaacaagagacccgcccccgatgacgcggataaaagcgagcccaagcgggcctgcccctcagtcgcggatccatcgacgtcagacgcggaaggagctccggtggactttgccgacaggtaccaaaacaaatgttctcgtcacgcgggcatgcttcagatgctgtttccctgcaagacatgcgagagaatgaatcagaatttcaacatttgcttcacgcacgggaccagagactgttcagaatgtttccccggcgtgtcagaatctcaaccggtcgtcagaaagaggacgtatcggaaactctgtgccattcatcatctgctagggcgggctcccgagattgcttgctcggcctgcgatctggtcaacgtggacctggatgactgtgtttctgagcaataaatgacttaaaccaggtatggctgccgatggttatcttccagattggctcgaggacaacctctctgagggcattcgcgagtggtgggacttgaaacctggagccccgaaacccaaagccaaccagcaaaagcaggacgacggccggggtctggtgcttcctggctacaagtacctcggacccttcaacggactcgacaagggggagcccgtcaacgcggcggacgcagcggccctcgagcacgacaaggcctacgaccagcagctcaaagcgggtgacaatccgtacctgcggtataaccacgccgacgccgagtttcaggagcgtctgcaagaagatacgtcttttgggggcaacctcgggcgagcagtcttccaggccaagaagcgggttctcgaacctctcggtctggttgaggaaggcgctaagacggctcctggaaagaagagaccggtagagccatcaccccagcgttctccagactcctctacgggcatcggcaagacaggccagcagcccgcgaaaaagagactcaactttgggcagactggcgactcagagtcagtgcccgaccctcaaccaatcggagaaccccccgcaggcccctctggtctgggatctggtacaatggctgcaggcggtggcgctccaatggcagacaataacgaaggcgccgacggagtgggtagttcctcaggaaattggcattgcgattccacatggctgggcgacagagtcatcaccaccagcacccgaacctgggccctccccacctacaacaaccacctctacaagcaaatctccaacgggacatcgggaggaagcaccaacgacaacacctacttcggctacagcaccccctgggggtattttgactttaacagattccactgccacttctcaccacgtgactggcagcgactcatcaacaacaactggggattccggcccaagagactcaacttcaagctcttcaacatccaggtcaaggaggtcacgcagaatgaaggcaccaagaccatcgccaataaccttaccagcacgattcaggtctttacggactcggaataccagctcccgtacgtcctcggctctgcgcaccagggctgcctgcctccgttcccggcggacgtcttcatgattcctcagtacgggtacctgactctgaacaacggcagtcaggccgtgggccgttcctccttctactgcctggagtactttccttctcaaatgctgagaacgggcaacaactttgagttcagctaccagtttgaggacgtgccttttcacagcagctacgcgcacagccaaagcctggaccggctgatgaaccccctcatcgaccagtacctgtactacctgtctcggactcagtccacgggaggtaccgcaggaactcagcagttgctattttctcaggccgggcctaataacatgtcggctcaggccaaaaactggctacccgggccctgctaccggcagcaacgcgtctccacgacactgtcgcaaaataacaacagcaactttgcttggaccggtgccaccaagtatcatctgaatggcagagactctctggtaaatcccggtgtcgctatggcaacgcacaaggacgacgaagagcgattttttccatccagcggagtcttgatgtttgggaaacagggagctggaaaagacaacgtggactatagcagcgttatgctaaccagtgaggaagaaatcaaaaccaccaacccagtggccacagaacagtacggcgtggtggccgataacctgcaacagcaaaacgccgctcctattgtaggggccgtcaacagtcaaggagccttacctggcatggtctggcagaaccgggacgtgtacctgcagggtcctatctgggccaagattcctcacacggacggcaactttcatccttcgccgctgatgggaggctttggactgaaacacccgcctcctcagatcctgattaagaatacacctgttcccgcggatcctccaactaccttcagtcaagccaagctggcgtcgttcatcacgcagtacagcaccggacaggtcagcgtggaaattgaatgggagctgcagaaagagaacagcaagcgctggaacccagagattcagtatacttccaactactacaaatctacaaatgtggactttgctgtcaatactgagggtacttattcagagcctcgccccattggcacccgttacctcacccgtaacctgtaattgcctgttaatcaataaaccggctaattcgtttcagttgaactttggtctctgcgaagggcgaattc

SEQ ID NO: 80 - protein, 738 aa, Artificial Sequence
  source: /note="Description of Artificial Sequence: Synthetic polypeptide"
MAADGYLPDWLEDNLSEGIREWWDLKPGAPKPKANQQKQDDGRGLVLPGYKYLGPFNGLDKGEPVNAADAAALEHDKAYDQQLKAGDNPYLRYNHADAEFQERLQEDTSFGGNLGRAVFQAKKRVLEPLGLVEEGAKTAPGKKRPVEPSPQRSPDSSTGIGKTGQQPAKKRLNFGQTGDSESVPDPQPIGEPPAGPSGLGSGTMAAGGGAPMADNNEGADGVGSSSGNWHCDSTWLGDRVITTSTRTWALPTYNNHLYKQISNGTSGGSTNDNTYFGYSTPWGYFDFNRFHCHFSPRDWQRLINNNWGFRPKRLNFKLFNIQVKEVTQNEGTKTIANNLTSTIQVFTDSEYQLPYVLGSAHQGCLPPFPADVFMIPQYGYLTLNNGSQAVGRSSFYCLEYFPSQMLRTGNNFEFSYQFEDVPFHSSYAHSQSLDRLMNPLIDQYLYYLSRTQSTGGTAGTQQLLFSQAGPNNMSAQAKNWLPGPCYRQQRVSTTLSQNNNSNFAWTGATKYHLNGRDSLVNPGVAMATHKDDEERFFPSSGVLMFGKQGAGKDNVDYSSVMLTSEEEIKTTNPVATEQYGVVADNLQQQNAAPIVGAVNSQGALPGMVWQNRDVYLQGPIWAKIPHTDGNFHPSPLMGGFGLKHPPPQILIKNTPVPADPPTTFSQAKLASFITQYSTGQVSVEIEWELQKENSKRWNPEIQYTSNYYKSTNVDFAVNTEGTYSEPRPIGTRYLTRNL

SEQ ID NO: 81 - DNA, 3084 bp, Artificial Sequence
  source: /note="Description of Artificial Sequence: Synthetic polynucleotide"
gaattcgccctttctacggctgcatcaactggaccaatgagaactttcccttcaacgattgcgtcgacaagatggtgatctggtgggaggagggcaagatgacggccaaggtcgtggagtccgccaaggccattctcggcggcagcaaggtgcgcgtggaccaaaagtgcaagtcgtccgcccagatcgaccccacccccgtgatcgtcacctccaacaccaacatgtgcgccgtgattgacgggaacagcaccaccttcgagcaccagcagccgttgcaggaccggatgttcaagttcgaactcacccgccgtctggagcacgactttggcaaggtgaccaagcaggaagtcaaagagttcttccgctgggcgcaggatcacgtgaccgaggtggcgcatgagttctacgtcagaaagggcggagccagcaaaagacccgcccccgatgacgcggatataagcgagcccaagcgggcctgcccctcagtcgcggatccatcgacgtcagacgcggaaggagctccggtggactttgccgacaggtaccaaaacaaatgttctcgtcacgcgggcatgcttcagatgctgtttccctgcaaaacgtgcgagaaaatgaatcagaatttcaacatttgcttcacgcacggggtcagagactgctcagaatgtttccccggtgcatcagaatctcaaccggtcgtcagaaaaaaaacgtatcagaaactgtgtgccattcatcatctgctggggcgggcacccgagattgcttgctcggcctgcgatctggtcaacgtggacctggacgactgtgtttctgagcaataaatgacttaaaccaggtatggctgccgatggttatcttccagattggcttgaggacaacctctctgagggcattcgcgagtggtgggacctgaaacctggagccccgaaacccaaagccaaccagcaaaagcaggacgacggccggggtctggtgcttcctggctacaagtacctcggacccttcaacggactcgacaagggggagcccgtcaacgcggcggacgcagcggccctcgagcacgacaaggcctacgaccagcagctcaaagcgggtgacaatccgtacctgcggtataaccacgccgacgccgagtttcaggagcgtctgcaagaagatacgtcttttgggggcaacctcgggcgagcagtcttccaggccaagaagcgggttctcgaacctctcggtctggttgaggaaggcgctaagacggctcctggaaagaagagaccggtagagccatcacctcagcgttcccccgactcctccacgggcatcggcaagaaaggccaccagcccgcgagaaagagactgaactttgggcagactggcgactcggagtcagtccccgaccctcaaccaatcggagaaccaccagcaggcccctctggtctgggatctggtacaatggctgcaggcggtggcgctccaatggcagacaataacgaaggcgccgacggagtgggtagttcctcaggaaattggcattgcgattccacatggctgggcgacagagtcatcaccaccagcacccgaacctgggccctgcccacctacaacaaccatctctacaagcaaatctccaacgggacatcgggaggaagcactaacgacaacacctactttggctacagcaccccctgggggtattttgacttcaacagattccactgccacttctcaccacgtgactggcagcgactcatcaacaataactggggattccggcccaagagactcaacttcaagctcttcaacatccaggtcaaggaggtcacgcagaatgaaggcaccaagaccatcgccaataaccttaccagcacgattcaggtgtttacggactcggaataccagctcccgtacgtccccggctctgcgcaccagggctgcctccctccgttcccggcggacgtcttcatgattcctcagtacgggtatctgaccctaaacaatggcagtcaggctgtgggccgttcctccttctactgcctggaatacttcccttctcaaatgctgaggacgggcaacaactttgaattcagctacaccttcgaggacgtgcctttccacagcagctacgcgcacagccagagcctggaccggctgatgaaccctctcatcgaccagtacctgtattacttatccagaactcagtccacaggaggaactcaaggtactcagcaattgttattttctcaagccgggcccgcaaacatgtcggctcaggccaagaactggctacctggaccgtgttaccgtcagcaacgagtttccacgacactgtcgcaaaacaacaacagcaattttgcttggaccggtgccaccaagtatcacctgaatggcagagactccctggttaatcccggcgttgccatggctacccacaaggacgacgaggagcgcttcttcccgtcaagcggagttctaatgtttggcaagcagggggctggaaaagacaatgtggactacagcagcgtgatgctcaccagcgaagaagaaattaaaactactaacccagtggctacagagcagtatggtgtggtggcagacaacctgcagcagaccaacggagctcccattgtgggaactgtcaacagccagggggccttacctggtatggtctggcaaaaccgggacgtgtacctgcagggccccatctgggccaaaattcctcacacggacggcaactttcatccttcgccgctgatgggaggctttggactgaaacacccgcctcctcagatcctggtgaaaaacactcctgttcctgcggatcctccgaccaccttcagccaggccaagctggcttcttttatcacgcagtacagcaccggacaggtcagcgtggaaatcgaatgggagctgcagaaagaaaacagcaagcgctggaacccagagattcagtatacttccaactactacaaatctacaaatgtggactttgctgtcaatactgagggtacttattcagagcctcgccccattggcactcgttatctcacccgtaatctgtaattgcttgttaatcaataaaccggt

SEQ ID NO: 82 - protein, 738 aa, Artificial Sequence
  source: /note="Description of Artificial Sequence: Synthetic polypeptide"
MAADGYLPDWLEDNLSEGIREWWDLKPGAPKPKANQQKQDDGRGLVLPGYKYLGPFNGLDKGEPVNAADAAALEHDKAYDQQLKAGDNPYLRYNHADAEFQERLQEDTSFGGNLGRAVFQAKKRVLEPLGLVEEGAKTAPGKKRPVEPSPQRSPDSSTGIGKKGHQPARKRLNFGQTGDSESVPDPQPIGEPPAGPSGLGSGTMAAGGGAPMADNNEGADGVGSSSGNWHCDSTWLGDRVITTSTRTWALPTYNNHLYKQISNGTSGGSTNDNTYFGYSTPWGYFDFNRFHCHFSPRDWQRLINNNWGFRPKRLNFKLFNIQVKEVTQNEGTKTIANNLTSTIQVFTDSEYQLPYVPGSAHQGCLPPFPADVFMIPQYGYLTLNNGSQAVGRSSFYCLEYFPSQMLRTGNNFEFSYTFEDVPFHSSYAHSQSLDRLMNPLIDQYLYYLSRTQSTGGTQGTQQLLFSQAGPANMSAQAKNWLPGPCYRQQRVSTTLSQNNNSNFAWTGATKYHLNGRDSLVNPGVAMATHKDDEERFFPSSGVLMFGKQGAGKDNVDYSSVMLTSEEEIKTTNPVATEQYGVVADNLQQTNGAPIVGTVNSQGALPGMVWQNRDVYLQGPIWAKIPHTDGNFHPSPLMGGFGLKHPPPQILVKNTPVPADPPTTFSQAKLASFITQYSTGQVSVEIEWELQKENSKRWNPEIQYTSNYYKSTNVDFAVNTEGTYSEPRPIGTRYLTRNL

SEQ ID NO: 83 - DNA, 3123 bp, Artificial Sequence
  source: /note="Description of Artificial Sequence: Synthetic polynucleotide"
gaattcgcccttggctgcgtcaactggaccaatgagaactttcccttcaacgattgcgtcgacaagatggtgatctggtgggaggagggcaagatgacggccaaggtcgtggagtccgccaaggccattctcggcggcagcaaggtgcgcgtggaccaaaagtgcaagtcgtccgcccagatcgaccccacccccgtgatcgtcacctccaacaccaacatgtgcgccgtgattgacgggaacagcaccaccttcgagcaccagcagccgttgcaggaccggatgttcaagttcgaactcacccgccgtctggagcacgactttggcaaggtgaccaagcaggaagtcaaagagttcttccgctgggcgcaggatcacgtgaccgaggtggcgcatgagttctacgtcagaaagggcggagccagcaaaagacccgcccccgatgacgcggatataagcgagcccaagcgggcctgcccctcagtcgcggatccatcgacgtcagacgcggaaggagctccggtggactttgccgacaggtaccaaaacaaatgttctcgtcacgcgggcatgctccagatgctgtttccctgcaaaacgtgcgagagaatgaatcagaatttcaacatttgcttcacgcacggggtcagagactgctcagaatgtttccccggtgcatcagaatctcaaccggtcgtcagaaaaaaaacgtatcagaaactgtgtgccattcatcatctgctggggcgggcacccgagattgcttgctcggcctgcgatctggtcaacgtggacctggacgactgtgtttctgagcaataaatgacttaaaccaggtatggctgccgatggttatcttccagattggcttgaggacaacctctctgagggcattcgcgagtggtgggacctgaaacctggagccccgaaacccaaagccaaccagcaaaagcaggacgacggccggggtctggtgcttcctggctacaagtacctcggacccttcaacggactcgacaagggggagcccgtcaacgcggcggacgcagcggccctcgagcacgacaaggcctacgaccagcagctcaaagcgggtgacaatccgtacctgcggtataaccacgccgacgccgagtttcaggagcgtctgcaagaagatacgtcttttgggggcaacctcgggcgagcagtcttccaggccaagaagcgggttctcgaacctctcggtctggttgaggaaggcgctaagacggctcctggaaagaagagaccggtagagccatcacctcagcgttcccccgactcctccacgggcatcggcaagaaaggccaccagcccgcgagaaagagactgaactttgggcagactggcgactcggagtcagtccccgaccctcaaccaatcggagaaccaccagcaggcccctctggtctgggatctggtacaatggctgcaggcggtggcgctccaatggcagacaataacgaaggcgccgacggagtgggtagttcctcaggaaattggcattgcgattccacatggctgggcgacagagtcatcaccaccagcacccgaacctgggccctgcccacctacaacaaccatctctacaagcaaatctccaacgggacatcgggaggaagcactaacgacaacacctactttggctacagcaccccctgggggtattttgacttcaacagattccactgccacttctcaccacgtgactggcagcgactcatcaacaataactggggattccggcccaagagactcaacttcaagctcttcaacatccaggtcaaggaggtcacgcagaatgaaggcaccaagaccatcgccaataaccttaccagcacgattcaggtgtttacggactcggaataccagctcccgtacgtcctcggctctgcgcaccagggctgcctccctccgttcccggcggacgtcttcatgattcctcagtacgggtatctgaccctaaacaatggcagtcaggctgtgggccgttcctccttctactgcctggaatacttcccttctcaaatgctgaggacgggcaacaactttgaattcagctacaccttcgaggacgtgcctttccacagcagctacgcgcacagccagagcctggaccggctgatgaaccctctcatcgaccagtacctgtattacttatccagaactcagtccacaggaggaactcaaggtactcagcaattgttattttctcaagccgggcccgcaaacatgtcggctcaggccaagaactggctacctggaccgtgttaccgtcagcaacgagtttccacgacactgtcgcaaaacaacaacagcaattttgcttggaccggtgccaccaagtatcacctgaatggcagagactccctggttaatcccggcgttgccatggctacccacaaggacgacgaggagcgcttcttcccgtcaagcggagttctaatgtttggcaagcagggggctggaaaagacaatgtggactacagcagcgtgatgctcaccagcgaagaagaaattaaaactactaacccagtggctacagagcagtatggtgtggtggcagacaacctgcagcagaccaacggagctcccattgtgggaactgtcaacagccagggggccttacctggtatggtctggcaaaaccgggacgtgtacctgcagggccccatctgggccaaaattcctcacacggacggcaactttcatccttcgccgctgatgggaggctttggactgaaacacccgcctcctcagatcctggtgaaaaacactcctgttcctgcggatcctccgaccaccttcagccaggccaagctggcttcttttatcacgcagtacagcaccggacaggtcagcgtggaaatcgaatgggagctgcagaaagaaaacagcaagcgctggaacccagagattcagtatacttccaactactacaaatctacaaatgtggactttgctgtcaatactgagggtacttattcagagcctcgccccattggcactcgttatctcacccgtaatctgtaattgcttgttaatcaataaaccggttaattcgtttcagttgaactttggtctctgcgaagggcgaattc

SEQ ID NO: 84 - protein, 738 aa, Artificial Sequence
  source: /note="Description of Artificial Sequence: Synthetic polypeptide"
MAADGYLPDWLEDNLSEGIREWWDLKPGAPKPKANQQKQDDGRGLVLPGYKYLGPFNGLDKGEPVNAADAAALEHDKAYDQQLKAGDNPYLRYNHADAEFQERLQEDTSFGGNLGRAVFQAKKRVLEPLGLVEEGAKTAPGKKRPVEPSPQRSPDSSTGIGKKGHQPARKRLNFGQTGDSESVPDPQPIGEPPAGPSGLGSGTMAAGGGAPMADNNEGADGVGSSSGNWHCDSTWLGDRVITTSTRTWALPTYNNHLYKQISNGTSGGSTNDNTYFGYSTPWGYFDFNRFHCHFSPRDWQRLINNNWGFRPKRLNFKLFNIQVKEVTQNEGTKTIANNLTSTIQVFTDSEYQLPYVLGSAHQGCLPPFPADVFMIPQYGYLTLNNGSQAVGRSSFYCLEYFPSQMLRTGNNFEFSYTFEDVPFHSSYAHSQSLDRLMNPLIDQYLYYLSRTQSTGGTQGTQQLLFSQAGPANMSAQAKNWLPGPCYRQQRVSTTLSQNNNSNFAWTGATKYHLNGRDSLVNPGVAMATHKDDEERFFPSSGVLMFGKQGAGKDNVDYSSVMLTSEEEIKTTNPVATEQYGVVADNLQQTNGAPIVGTVNSQGALPGMVWQNRDVYLQGPIWAKIPHTDGNFHPSPLMGGFGLKHPPPQILVKNTPVPADPPTTFSQAKLASFITQYSTGQVSVEIEWELQKENSKRWNPEIQYTSNYYKSTNVDFAVNTEGTYSEPRPIGTRYLTRNL

SEQ ID NO: 85 - DNA, 3122 bp, Artificial Sequence
  source: /note="Description of Artificial Sequence: Synthetic polynucleotide"
gaattcgccctttctacggctgcgtcaactggaccaatgagaactttcccttcaacgattgcgtcgacaagatggtgatctggtgggaggagggcaagatgacggccaaggtcgtggagtccgccaaggccattctcggcggcagcaaggtgcgtgtggaccaaaagtgcaagtcttccgcccagatcgatcccacccccgtgatcgtcacctccaacaccaacatgtgcgccgtgattgacgggaacagcgccaccttcgagcaccagcagccgttgcaggaccggatgttcaaatttgaactcacccgccgtctggagcatgactttggcaaggtgacgaagcaggaagtcaaagagttcttccgctgggcgcaggatcacgtgaccgaggtggcgcatgagttccacgtcagaaagggtggagccaacaagagacccgcccccgatgacgcggatataagcgagcccaagcgggcctgcccctcagtcgcggatccatcgacgtcagacgcggaaggagctccggtggactttgccgacaggtaccaaaacaaatgttctcgtcacgcgggcatgcttcagatgctgtttccctgcaagacatgcgagagaatgaatcagaatttcaacatttgcttcacgcacgggaccagagactgttcagaatgtttccccggcgtgtcagaatctcaaccggtcgtcagaaagaggacgtatcggaaactctgtgcgattcatcatctgctggggcgggctcccgagattgcttgctcggcctgcgatctggtcaacgtggacctggatgactgtgtttctgagcaataaatgacttaaaccaggtatggctgccgatggttatcttccagattggctcgaggacaacctctctgagggcattcgcgagtggtgggacttgaaacctggagccccgaaacccaaagccaaccagcaaaagcaggacgacggccggggtctggtgcttcctggctacaagtacctcggacccttcaacggactcgacaagggggagcccgtcaacgcggcggacgcagcggccctcgagcacgacaaagcctacgaccagcagctcaaagcgggtgacaatccgtacctgcggtataatcacgccgacgccgagtttcaggagcgtctgcaagaagatacgtcttttgggggcaacctcgggcgagcagtcttccaggccaagaagcgggttctcgaacctctcggtctggttgaggaaggcgctaagacggctcctggaaagaagagactggtagagcagtcgccacaagagccagactcctcctcgggcatcggcaagacaggccagcagcccgctaaaaagagactcaattttggtcagactggcgactcagagtcagtccccgacccacaacctctcggagaacctccagcagccccctcaggtctgggacctaatacaatggcttcaggcggtggcgctccaatggcagacaataacgaaggcgccgacggagtgggtaattcctcgggaaattggcattgcgattccacatggctgggggacagagtcatcaccaccagcacccgaacctgggccctgcccacctacaacaaccacctctacaagcaaatctccaacggcacctcgggaggaagcaccaacgacaacacctattttggctacagcaccccctgggggtattttgacttcaacagattccactgtcacttttcaccacgtgactggcaacgactcatcaacaacaattggggattccggcccaaaagactcaacttcaagctgttcaacatccaggtcaaggaagtcacgacgaacgaaggcaccaagaccatcgccaataatctcaccagcaccgtgcaggtctttacggactcggagtaccagttaccgtacgtgctaggatccgctcaccagggatgtctgcctccgttcccggcggacgtcttcacggttcctcagtacggctatttaactttaaacaatggaagccaagccctgggacgttcctccttctactgtctggagtatttcccatcgcagatgctgagaaccggcaacaactttcagttcagctacaccttcgaggacgtgcctttccacagcagctacgcgcacagccagagcctggacaggctgatgaatcccctcatcgaccagtacctgtactacctggtcagaacgcaaacgactggaactggagggacgcagactctggcattcagccaagcgggtcctagctcaatggccaaccaggctagaaattgggtgcccggaccttgctaccggcagcagcgcgtctccacgacaaccaaccagaacaacaacagcaactttgcctggacgggagctgccaagtttaagctgaacggccgagactctctaatgaatccgggcgtggcaatggcttcccacaaggatgacgacgaccgcttcttcccttcgagcggggtcctgatttttggcaagcaaggagccgggaacgatggagtggattacagccaagtgctgattacagatgaggaagaaatcaaggctaccaaccccgtggccacagaagaatatggagcagtggccatcaacaaccaggccgccaatacgcaggcgcagaccggactcgtgcacaaccagggggtgattcccggcatggtgtggcagaatagagacgtgtacctgcagggtcccatctgggccaaaattcctcacacggacggcaactttcacccgtctcccctgatgggcggctttggactgaagcacccgcctcctcaaattctcatcaagaacacaccggttccagcggacccgccgcttaccttcaaccaggccaagctgaactctttcatcacgcagtacagcaccggacaggtcagcgtggaaatcgagtgggagctgcagaaagaaaacagcaaacgctggaatccagagattcaatacacttccaactactacaaatctacaaatgtggactttgctgtcaacacggaaggagtttatagcgagcctcgccccattggcacccgttacctcacccgcaacctgtaattacatgttaatcaataaaccggttaattcgtttcagttgaactttggtctctgcgaagggcgaattc

SEQ ID NO: 86 - protein, 736 aa, Artificial Sequence
  source: /note="Description of Artificial Sequence: Synthetic polypeptide"
MAADGYLPDWLEDNLSEGIREWWDLKPGAPKPKANQQKQDDGRGLVLPGYKYLGPFNGLDKGEPVNAADAAALEHDKAYDQQLKAGDNPYLRYNHADAEFQERLQEDTSFGGNLGRAVFQAKKRVLEPLGLVEEGAKTAPGKKRLVEQSPQEPDSSSGIGKTGQQPAKKRLNFGQTGDSESVPDPQPLGEPPAAPSGLGPNTMASGGGAPMADNNEGADGVGNSSGNWHCDSTWLGDRVITTSTRTWALPTYNNHLYKQISNGTSGGSTNDNTYFGYSTPWGYFDFNRFHCHFSPRDWQRLINNNWGFRPKRLNFKLFNIQVKEVTTNEGTKTIANNLTSTVQVFTDSEYQLPYVLGSAHQGCLPPFPADVFTVPQYGYLTLNNGSQALGRSSFYCLEYFPSQMLRTGNNFQFSYTFEDVPFHSSYAHSQSLDRLMNPLIDQYLYYLVRTQTTGTGGTQTLAFSQAGPSSMANQARNWVPGPCYRQQRVSTTTNQNNNSNFAWTGAAKFKLNGRDSLMNPGVAMASHKDDDDRFFPSSGVLIFGKQGAGNDGVDYSQVLITDEEEIKATNPVATEEYGAVAINNQAANTQAQTGLVHNQGVIPGMVWQNRDVYLQGPIWAKIPHTDGNFHPSPLMGGFGLKHPPPQILIKNTPVPADPPLTFNQAKLNSFITQYSTGQVSVEIEWELQKENSKRWNPEIQYTSNYYKSTNVDFAVNTEGVYSEPRPIGTRYLTRNL

SEQ ID NO: 87 - DNA, 3117 bp, Artificial Sequence
  source: /note="Description of Artificial Sequence: Synthetic polynucleotide"
gaattcgcccttggctgcgtcaactggaccaatgagaactttcccttcaacgattgcgtcgacaagatggtgatctggtgggaggagggcaagatgacggccaaggtcgtggagtccgccaaggccattctcggcggcagcaaggtgcgtgtggaccaaaagtgcaagtcttccgcccagatcgatcccacccccgtgatcgtcacctccaacaccaacatgtgcgccgtgattgacgggaacagcaccaccttcgagcaccagcagccgttgcaggaccggatgttcaaatttgaactcacccgccgtctggagcatgactttggcaaggtgacgaagcaggaagtcaaagagttcttccgctgggcgcaggatcacgtgaccgaggtggcgcatgagttccacgtcagaaagggtggagccaacaagagacccgcccccgatgacgcggatataagcgagcccaagcgggcctgcccctcagtcgcggatccatcgacgtcagacgcggaaggagctccggtggactttgccgacaggtaccaaaacaaatgttctcgtcacgcgggcatgcttcagatgctgtttccctgcaagacatgcgagagaatgaatcagaatttcaacatttgcttcacgcacgggaccagagactgttcagaatgtttccccggcgtgtcagaatctcaaccggtcgtcagaaagaggacgtatcggaaactctgtgcgattcatcatctgctggggcgggctcccgagattgcttgctcggcctgcgatctggtcaacgtggacctggatgactgtgtttctgagcaataaatgacttaaaccaggtatggctgccgatggttatcttccagattggctcgaggacaacctctctgagggcattcgcgagtggtgggacttgaaacctggagccccgaaacccaaagccaaccagcaaaagcaggacgacggccggggtctggtgcttcctggctacaagtacctcggacccttcaacggactcgacaagggggagcccgtcaacgcggcggacgcagcggccctcgagcacgacaaagcctacgaccagcagctcaaagcgggtgacaatccgtacctgcggtataatcacgccgacgccgagtttcaggagcgtctgcaagaagatacgtcttttgggggcaacctcgggcgagcagtcttccaggccaagaagcgggttctcgaacctctcggtctggttgaggaaggcgctaagacggctcctggaaagaagagaccggtagagcagtcgccacaagagccagactcctcctcgggcatcggcaagacaggccagcagcccgctaaaaagagactcaattttggtcagactggcgactcagagtcagtccccgacccacaacctctcggagaacctccagcagccccctcaggtctgggacctaatacaatggcttcaggcggtggcgctccaatggcagacaataacgaaggcgccgacggagtgggtaattcctcgggaaattggcattgcgattccacatggctgggggacagagtcatcaccaccagcacccgaacctgggccctgcccacctacaacaaccacctctacaagcaaatctccaacggcacctcgggaggaagcaccaacgacaacacctattttggctacagcaccccctgggggtattttgacttcaacagattccactgtcacttttcaccacgtgactggcaacgactcatcaacaacaattggggattccggcccaaaagactcaacttcaagctgttcaacatccaggtcaaggaagtcacgacgaacgaaggcaccaagaccatcgccaataatctcaccagcaccgtgcgggtctttacggactcggagtaccagttaccgtacgtgctaggatccgctcaccagggatgtctgcctccgttcccggcggacgtcttcatggttcctcagtacggctatttaactttaaacaatggaagccaagccctgggacgttcctccttctactgtctggagtatttcccatcgcagatgctgagaaccggcaacaactttcagttcagctacaccttcgaggacgtgcctttccacagcagctacgcgcacagccagagcctggacaggctgatgaatcccctcatcgaccagtacctgtactacctggtcagaacgcaaacgactggaactggagggacgcagactctggcattcagccaagcgggtcctagctcaatggccaaccaggctagaaattgggtgcccggaccttgctaccggcagcagcgcgtctccacgacaaccaaccagagcaacaacagcaactttgcctggacgggagctgccaagtttaagctgaacggccgagactctctaatgaatccgggcgtggcaatggcttcccacaaggatgacgacgaccgcttcttcccttcgagcggggtcctgatttttggcaagcaaggagccgggaacgatggagtggattacagccaagtgctgattacagatgaggaagaaatcaaggctaccaaccccgtggccacagaagaatatggagcagtggccatcaacaaccaggccgccaatacgcaggcgcagaccggactcgtgcacaaccagggggtgattcccggcatggtgtggcagaatagagacgtgtacctgcagggtcccatctgggccaaaattcctcacacggacggcaactttcacccgtctcccctgatgggcggctttggactgaagcacccgcctcctcaaattctcatcaagaacacaccggttccagcggacccgccgcttaccttcaaccaggccaagctgaactctttcatcacgcagtacagcaccggacaggtcagcgtggaaatcgagtgggagctgcagaaagaaaacagcaaacgctggaatccagagattcaatacacttccaactactacaaatctacaaatgtggactttgctgtcaacacggaaggagtttatagcgagcctcgccccattggcacccgttacctcacccgcaacctgtaattacatgttaatcaataaaccggttaattcgtttcagttgaactttggtctctgcgaagggcgaattc

SEQ ID NO: 88 - protein, 736 aa, Artificial Sequence
  source: /note="Description of Artificial Sequence: Synthetic polypeptide"
MAADGYLPDWLEDNLSEGIREWWDLKPGAPKPKANQQKQDDGRGLVLPGYKYLGPFNGLDKGEPVNAADAAALEHDKAYDQQLKAGDNPYLRYNHADAEFQERLQEDTSFGGNLGRAVFQAKKRVLEPLGLVEEGAKTAPGKKRPVEQSPQEPDSSSGIGKTGQQPAKKRLNFGQTGDSESVPDPQPLGEPPAAPSGLGPNTMASGGGAPMADNNEGADGVGNSSGNWHCDSTWLGDRVITTSTRTWALPTYNNHLYKQISNGTSGGSTNDNTYFGYSTPWGYFDFNRFHCHFSPRDWQRLINNNWGFRPKRLNFKLFNIQVKEVTTNEGTKTIANNLTSTVRVFTDSEYQLPYVLGSAHQGCLPPFPADVFMVPQYGYLTLNNGSQALGRSSFYCLEYFPSQMLRTGNNFQFSYTFEDVPFHSSYAHSQSLDRLMNPLIDQYLYYLVRTQTTGTGGTQTLAFSQAGPSSMANQARNWVPGPCYRQQRVSTTTNQSNNSNFAWTGAAKFKLNGRDSLMNPGVAMASHKDDDDRFFPSSGVLIFGKQGAGNDGVDYSQVLITDEEEIKATNPVATEEYGAVAINNQAANTQAQTGLVHNQGVIPGMVWQNRDVYLQGPIWAKIPHTDGNFHPSPLMGGFGLKHPPPQILIKNTPVPADPPLTFNQAKLNSFITQYSTGQVSVEIEWELQKENSKRWNPEIQYTSNYYKSTNVDFAVNTEGVYSEPRPIGTRYLTRNL

SEQ ID NO: 89 - DNA, 3121 bp, Artificial Sequence
  source: /note="Description of Artificial Sequence: Synthetic polynucleotide"
gaattcgcccttctacggctgcgtcaactggaccaatgagaactttcccttcaacgattgcgtcgacaagatggtgatctggtgggaggagggcaagatgacggccaaggtcgtggagtccgccaaggccattctcggcggcagcaaggtgcgtgtggaccaaaagtgcaagtcttccgcccagatcgatcccacccccgtgatcgtcacctccaacaccaacatgtgcgccgtgattgacgggaacagcaccaccttcgagcaccagcagccgttgcaggaccggatgttcaaatttgaactcacccgccgtctggagcatgactttggcaaggtgacgaagcaggaagtcaaagagttcttccgctgggcgcaggatcacgtgaccgaggtggcgcatgagttccacgtcagaaagggtggcgccaacaagagacccgcccccgatgacgcggatataagcgagcccaagcgggcctgcccctcagtcgcggatccatcgacgtcagacgcggaaggagctccggtggactttgccgacaggtaccaaaacaaatgttctcgtcacgcgggcatgcttcagatgctgtttccctgcaagacatgcgagagaatgaatcagaatttcaacatttgcttcacgcacgggaccagagactgttcagaatgtttccccggcgtgtcagaatctcaaccggtcgtcagaaagaggacgtatcggaaactctgtgcgattcatcatctgctggggcgggctcccgagattgcttgctcggcctgcgatctggtcaacgtggacctggatgactgtgtttctgagcaataaatgacttaaaccaggtatggctgccgatggttatcttccagattggctcgaggacaacctctctgagggcattcgcgagtggtgggacttgaaacctggagccccgaaacccaaagccaaccagcaaaagcaggacgacggccggggtctggtgcttcctggctacaagtacctcggacccttcaacggactcgacaagggggagcccgtcaacgcggcggacgcagcggccctcgagcacgacaaagcctacgaccagcagctcaaagcgggtgacaatccgtacctgcggtataatcacgccgacgccgagtttcaggagcgtctgcaagaagatacgtcctttgggggcaacctcgggcgagcagtcttccaggccaagaagcgggttctcgaacctctcggtctggttgaggaaggcgctaagacggctcctggaaagaagagaccggtagagcagtcgccacaagagccagactcctcctcgggcatcggcaagacaggccagcagcccgctaaaaagagactcaattttggtcagactggcgactcagagtcagtccccgacccacaacctctcggagaacctccagcagccccctcaggtctgggacctaatacaatggcttcaggcggtggcgctccaatggcagacaataacgaaggcgccgacggagtgggtaattcctcgggaaattggcattgcgattccacatggctgggggacagagtcatcaccaccagcacccgaacctgggccctgcccacctacaacaaccacctctacaagcaaatctccaacggcacctcgggaggaagcaccaacgacaacacctattttggctacagcaccccctgggggtattttgacttcaacagattccactgtcacttttcaccacgtgactggcaacgactcatcaacaacaattggggattccggcccaaaagactcaacttcaagctgttcaacatccaggtcaaggaagtcacgacgaacgaaggcaccaagaccatcgccaataatctcaccagcaccgtgcaggtctttacggacttggagtaccagttaccgtacgtgctaggatccgctcaccagggatgtctgcctccgttcccggcggacgtcttcatggttcctcagtacggctatttaactttaaacaatggaagccaagccctgggacgttcctccttctactgtctggagtatttcccatcgcagatgccgagaaccggcaacaactttcagttcagctacaccttcgaggacgtgcctttccacagcagctacgcgcacagccagagcctggacaggctgatgaatcccctcatcgaccagtacctgtactacctggtcagaacgcaaacgactggaactggagggacgcagactctggcattcagccaagcgggtcctagctcaatggccaaccaggctagaaattgggtgcccggaccttgctaccggcagcagcgcgtctccacgacaaccaaccagaacaacaacagcaactttgcctggacgggagctgccaagtttaagctgaacggccgagactctctaatgaatccgggcgtggcaatggcttcccacaaggatgacgacgaccgcttcttcccttcgagcggggtcctgatttttggcaagcaaggagccgggaacgatggagtggattacagccaagtgctgattacagatgaggaagaaatcaaggctaccaaccccgtggccacagaagaatatggagcagtggccatcaacaaccaggccgccaatacgcaggcgcagaccggactcgtgcacaaccagggggtgattcccggcatggtgtggcagaatagagacgtgtacctgcagggtcccatctgggccaaaattcctcacacggacggcaactttcacccgtctcccctgatgggcggctttggactgaagcacccgcctcctcaaattctcatcaagaacacaccggttccagcggacccgccgcttaccttcaaccaggccaagctgaactctttcatcacgcagtacagcaccggacaggtcagcgtggaaatcgagtgggagctgcagaaagaaaacagcaaacgctggaatccagagattcaatacacttccaactactacaaatctacaaatgtggactttgctgtcaacacggaaggagtttatagcgagcctcgccccattggcacccgttacctcacccgcaacctgtaattacatgttaatcaataaaccggttaattcgtttcagttgaactttggtctctgcgaagggcgaattc

SEQ ID NO: 90 - protein, 736 aa, Artificial Sequence
  source: /note="Description of Artificial Sequence: Synthetic polypeptide"
MAADGYLPDWLEDNLSEGIREWWDLKPGAPKPKANQQKQDDGRGLVLPGYKYLGPFNGLDKGEPVNAADAAALEHDKAYDQQLKAGDNPYLRYNHADAEFQERLQEDTSFGGNLGRAVFQAKKRVLEPLGLVEEGAKTAPGKKRPVEQSPQEPDSSSGIGKTGQQPAKKRLNFGQTGDSESVPDPQPLGEPPAAPSGLGPNTMASGGGAPMADNNEGADGVGNSSGNWHCDSTWLGDRVITTSTRTWALPTYNNHLYKQISNGTSGGSTNDNTYFGYSTPWGYFDFNRFHCHFSPRDWQRLINNNWGFRPKRLNFKLFNIQVKEVTTNEGTKTIANNLTSTVQVFTDLEYQLPYVLGSAHQGCLPPFPADVFMVPQYGYLTLNNGSQALGRSSFYCLEYFPSQMPRTGNNFQFSYTFEDVPFHSSYAHSQSLDRLMNPLIDQYLYYLVRTQTTGTGGTQTLAFSQAGPSSMANQARNWVPGPCYRQQRVSTTTNQNNNSNFAWTGAAKFKLNGRDSLMNPGVAMASHKDDDDRFFPSSGVLIFGKQGAGNDGVDYSQVLITDEEEIKATNPVATEEYGAVAINNQAANTQAQTGLVHNQGVIPGMVWQNRDVYLQGPIWAKIPHTDGNFHPSPLMGGFGLKHPPPQILIKNTPVPADPPLTFNQAKLNSFITQYSTGQVSVEIEWELQKENSKRWNPEIQYTSNYYKSTNVDFAVNTEGVYSEPRPIGTRYLTRNL

SEQ ID NO: 91 - DNA, 3122 bp, Artificial Sequence
  source: /note="Description of Artificial Sequence: Synthetic polynucleotide"
gaattcgccctttctacggctgcgtcaactggaccaatgagaactttcccttcaacgattgcgtcgacaagatggtgatctggtgggaggagggcaagatgacggccaaggtcgtggagtccgccaaggccattctcggcggcagcaaggtgcgtgtggaccaaaagtgcaagtcttccgcccagatcgatcccacccccgtgatcgtcacctccaacaccaacatgtgcgccgtgattgacgggaacagcaccaccttcgagcaccagcagccgttgcaggaccggatgttcaaatttgaactcacccgccgtctggagcatgactttggcaaggtgacgaagcaggaagtcaaagggttcttccgctgggcgcaggatcacgtgaccgaggtggcgcatgagttccacgtgcgagcccaagcgggcctgcccctcagtcgcggatccatcgacgtcagaccagaaagggtggagccaacaagagacccgcccccgatgacgcggatataagcggaaggagctccggtggactttgccgacaggtaccaaaacaaatgttctcgtcacgcgggcatgcttcagatgctgtttccctgcaagacatgcgagagaatgaatcagaatttcaacatttgcttcacgcacgggaccagagactgttcagaatgtttccccggcgtgtcagaatctcaaccggtcgtcagaaagaggacgtatcggaaactctgtgcgattcatcatctgctggggcgggctcccgagattgcttgctcggcctgcgatctggtcaacgtggacctggatgactgtgtttctgagcaataaatgacttaaaccaggtatggctgccgatggttatcttccagattggctcgaggacaacctctctgagggcattcgcgagtggtgggacttgaaacctggagccccgaaacccaaagccaaccagcaaaagcaggacgacggccggggtctggtgcttcctggctacaagtacctcggacccttcaacggactcgacaagggggagcccgtcaacgcggcggacgcagcggccctcgagcacgacaaagcctacgaccagcagctcaaagcgggtgacaatccgtacctgcggtataatcacgccgacgccgagtttcaggagcgtctgcaagaagatacgtcttttgggggcaacctcgggcgagcagtcttccaggccaagaagcgggttctcgaacctctcggtctggttgaggaaggcgctaagacggctcctggaaagaagagaccggtagagcagtcgccacaagagccagactcctcctcgggcatcggcaagacaggccagcagcccgctaaaaagagactcaattttggtcagactggcgactcagagtcagtccccgacccacaacctctcggagaacctccagcagccccctcaggtctgggacctaatacaatggcttcaggcggtggcgctccaatggcagacaataacgaaggcgccgacggagtgggtaattcctcgggaaattggcattgcgattccacatggctgggggacagagtcatcaccaccagcacccgaacctgggccctgcccacctacaacaaccacctctacaagcaaatctccaacggcacctcgggaggaagcaccaacgacaacacctattttggctacagcaccccctgggggtattttgacttcaacagattccactgtcacttttcaccacgtgactggcaacgactcatcaacaacaattggggattccggcccaaaagactcaacttcaagctgttcaacatccaggtcaaggaagtcacgacgaacgaaggcaccaagaccatcgccaataatctcaccagcaccgtgcaggtctttacggactcggagtaccagttaccgtacgtgctaggatccgctcaccagggatgtctgcctccgttcccggcggacgtcttcatggttcctcagtacggctatttaactttaaacaatggaagccaagccctgggacgttcctccttctactgtctggagtatttcccatcgcagatgctgagaaccggcaacaactttcagttcagctacaccttcgaggacgtgcctttccacagcagctacgcgcacagccagagcctggacaggctgatgaatcccctcatcgaccagtacctgtactacctggtcagaacgcaaacgactggaactggagggacgcagactctggcattcagccaagcgggtcctagctcaatggccaaccaggctagaaattgggtgcccggaccttgctaccggcagcagcgcgtctccacgacaaccaaccagaacaacaacagcaactttgcctggacgggagctgccaagtttaagctgaacggccgagactctctaatgaatccgggcgtggcaatggcttcccacaaggatgacgacgaccgcttcttcccttcgagcggggtcctgatttttggcaagcaaggagccgggaacgatggagtggattacagccaagtgctgattacagatgaggaagaaatcaaggctaccaaccccgtggccacagaagaatatggagcagtggccatcaacaaccaggccgccaatacgcaggcgcagaccggactcgtgcacaaccagggggtgattcccggcatggtgtggcagaatagagacgtgtacctgcagggtcccatctgggccaaaattcctcacacggacggcaactttcacccgtctcccctgatgggcggctttggactgaagcacccgcctcctcaaattctcatcaagaacacaccggttccagcggacccgccgcttaccttcaaccaggccaagctgaactctttcatcacgcagtacagcaccggacaggtcagcgtggaaatcgagtgggagctgcagaaagaaaacagcaaacgctggaatccagagattcaatacacttccaactactacaaatctacaaatgtggactttgctgtcaacacggagggggtttatagcgagcctcgccccattggcacccgttacctcacccgcaacctgtaattacatgttaatcaataaaccggttaattcgtttcagttgaactttggtctctgcgaagggcgaattc

SEQ ID NO: 92 - protein, 736 aa, Artificial Sequence
  source: /note="Description of Artificial Sequence: Synthetic polypeptide"
MAADGYLPDWLEDNLSEGIREWWDLKPGAPKPKANQQKQDDGRGLVLPGYKYLGPFNGLDKGEPVNAADAAALEHDKAYDQQLKAGDNPYLRYNHADAEFQERLQEDTSFGGNLGRAVFQAKKRVLEPLGLVEEGAKTAPGKKRPVEQSPQEPDSSSGIGKTGQQPAKKRLNFGQTGDSESVPDPQPLGEPPAAPSGLGPNTMASGGGAPMADNNEGADGVGNSSGNWHCDSTWLGDRVITTSTRTWALPTYNNHLYKQISNGTSGGSTNDNTYFGYSTPWGYFDFNRFHCHFSPRDWQRLINNNWGFRPKRLNFKLFNIQVKEVTTNEGTKTIANNLTSTVQVFTDSEYQLPYVLGSAHQGCLPPFPADVFMVPQYGYLTLNNGSQALGRSSFYCLEYFPSQMLRTGNNFQFSYTFEDVPFHSSYAHSQSLDRLMNPLIDQYLYYLVRTQTTGTGGTQTLAFSQAGPSSMANQARNWVPGPCYRQQRVSTTTNQNNNSNFAWTGAAKFKLNGRDSLMNPGVAMASHKDDDDRFFPSSGVLIFGKQGAGNDGVDYSQVLITDEEEIKATNPVATEEYGAVAINNQAANTQAQTGLVHNQGVIPGMVWQNRDVYLQGPIWAKIPHTDGNFHPSPLMGGFGLKHPPPQILIKNTPVPADPPLTFNQAKLNSFITQYSTGQVSVEIEWELQKENSKRWNPEIQYTSNYYKSTNVDFAVNTEGVYSEPRPIGTRYLTRNL

SEQ ID NO: 93 - DNA, 2370 bp, Artificial Sequence
  source: /note="Description of Artificial Sequence: Synthetic polynucleotide"
gaattcgccctttctacggctgcgtcaactggaccaatgagaactttcccttcaacgattgcgtcgacaagatggtgatctggtgggaggagggcaagatgacggccaaggtcgtggagtccgccaaggccattctcggcggcagcaaggtgcgcgtggaccaaaagtgcaagtcgtccgcccagatcgaccccacccccgtgatcgtcacctccaacaccaacatgtgcgccgtgattgacgggaacagcaccaccttcgagcaccagcagccgttgcaggaccggatgttcaagttcgaactcacccgccgtctggagcacgactttggcaaggtgaccaagcaggaagtcaaagagttcttccgctgggcgcaggatcacgtgaccgaggtggcgcatgagttctacgtcagaaagggcggagccagcaaaagacccgcccccgatgacgcggatataagcgagcccaagcgggcctgcccctcagtcgcggatccatcgacgtcagacgcggaaggagctccggtggactttgccgacaggtaccaaaacaaatgttctcgtcacgcgggcatgcttcagacgctgtttccctgcaaaacgtgcgagagaatgaatcagaatttcaacatttgcttcacgcacggggtcagagactgctcagaatgtttccccggtgcatcagaatctcaaccggtcgtcagaaaaaaaacgtatcagaaactgtgtgccattcatcatctgctggggcgggcacccgagattgcttgctcggcctgcgatctggtcaacgtggacctggacgactgtgtttctgagcaataaatgacttaaaccaggtatggctgccgatggttatcttccagattggcttgaggacaacctctctgagggcattcgcgagtggtgggacctgaaacctggagccccgaaacccaaagccaaccagcaaaagcaggacgacggccggggtctggtgcttcctggctacaagtacctcggacccttcaacggactcgacaagggggagcccgtcaacgcggcggacgcagcggccctcgagcacgacaaggcctacgaccagcagctcaaagcgggtgacaatccgtacctgcggtataaccacgccgacgccgagtttcaggagcgtctgcaagaagatacgtcttttgggggcaacctcgggcgagcagtcttccaggccaagaagcgggttctcgaacctctcggtctggttgaggaaggcgctaagacggctcctggaaagaagagaccggtagagccatcacctcagcgttcccccgactcctccacgggcatcggcaagaaaggccaccagcccgcgagaaagagactgaactttgggcagactggcgactcggagtcagtccccgaccctcaaccaatcggagaaccaccagcaggcccctctggtctgggatctggtacaatggctgcaggcggtggcgctccaatggcagacaataacgaaggcgccgacggagtgggtagttcctcaggaaattggcattgcgattccacatggctgggcgacagagtcatcaccaccagcacccgaacctgggccctgcccacctacaacaaccatctctacaagcaaatctccaacgggacatcgggaggaagcactaacgacaacacctactttggctacagcaccccctgggggtattttgacttcaacagattccactgccacttctcaccacgtgactggcagcgactcatcaacaataactggggattccggcccaagagactcaacttcaagctcttcaacatccaggtcaaggaggtcacgcagaatgaaggcaccaagaccatcgccaataaccttaccagcacgattcaggtgtttacggactcggaataccagctcccgtacgtcctcggctctgcgcaccagggctgcctccctccgttcccggcggacgtcttcatgattcctcagtacgggtatctgaccctaaacaatggcagtcaggctgtgggccgttcctccttctactgcctggaatacttcccttctcaaatgctgaggacgggcaacaactttgaattcagctacaccttcgaggacgtgcctttccacagcagctacgcgcacagccagagcctggaccggctgatgaaccctctcatcgaccagtacctgtattacttatccagaactcagtccacaggaggaactcaaggtactcagcaattgttattttctcaagccgggcccgcaaacatgtyggctcaggccaagaactggctacctggaccgtgttaccgtcagcaacgagtttccacgacactgtcgcaaaacaacaacagcaattttgctggaccggtgccacca

SEQ ID NO: 94 - protein, 738 aa, Artificial Sequence; identical to SEQ ID NO: 84
  source: /note="Description of Artificial Sequence: Synthetic polypeptide"

SEQ ID NO: 95 - DNA, 2205 bp, Artificial Sequence
  source: /note="Description of Artificial Sequence: Synthetic polynucleotide"
atgactgacggttaccttccagattggctagaggacaacctctctgaaggcgttcgagagtggtgggcgctgcaacctggagcccctaaacccaaggcaaatcaacaacatcaggacaacgctcggggtcttgtgcttccgggttacaaatacctcggacccggcaacggactcgacaagggggaacccgtcaacgcagcggacgcggcagccctcgagcacgacaaggcctacgaccagcagctcaaggccggtgacaacccctacctcaagtacaaccacgccgacgcggagttccagcagcggcttcagggcgacacatcgtttgggggcaacctcggcagagcagtcttccaggccaaaaagagggttcttgaacctcttggtctggttgagcaagcgggtgagacggctcctggaaagaagagaccgttgattgaatccccccagcagcccgactcctccacgggtatcggcaaaaaaggcaagcagccggctaaaaagaagctcgttttcgaagacgaaactggagcaggcgacggaccccctgagggatcaacttccggagccatgtctgatgacagtgagatgcgtgcagcagctggcggagctgcagtcgagggcggacaaggtgccgatggagtgggtaatgcctcgggtgattggcattgcgattccacctggtctgagggccacgtcacgaccaccagcaccagaacctgggtcttgcccacctacaacaaccacctctacaagcgactcggagagagcctgcagtccaacacctacaacggattctccaccccctggggatactttgacttcaaccgcttccactgccacttctcaccacgtgactggcagcgactcatcaacaacaactggggcatgcgacccaaagccatgcgggtcaaaatcttcaacatccaggtcaaggaggtcacgacgtcgaacggcgagacaacggtggctaataaccttaccagcacggttcagatctttgcggactcgtcgtacgaactgccgtacgtgatggatgcgggtcaagagggcagcctgcctccttttcccaacgacgtctttatggtgccccagtacggctactgtggactggtgaccggcaacacttcgcagcaacagactgacagaaatgccttctactgcctggagtactttccttcgcagatgctgcggactggcaacaactttgaaattacgtacagttttgagaaggtgcctttccactcgatgtacgcgcacagccagagcctggaccggctgatgaaccctctcatcgaccagtacctgtggggactgcaatcgaccaccaccggaaccaccctgaatgccgggactgccaccaccaactttaccaagctgcggcctaccaacttttccaactttaaaaagaactggctgcccgggccttcaatcaagcagcagggcttctcaaagactgccaatcaaaactacaagatccctgccaccgggtcagacagtctcatcaaatacgagacgcacagcactctggacggaagatggagtgccctgacccccggacctccaatggccacggctggacctgcggacagcaagttcagcaacagccagctcatctttgcggggcctaaacagaacggcaacacggccaccgtacccgggactctgatcttcacctctgaggaggagctggcagccaccaacgccaccgatacggacatgtggggcaacctacctggcggtgaccagagcaacagcaacctgccgaccgtggacagactgacagccttgggagccgtgcctggaatggtctggcaaaacagagacatttactaccagggtcccatttgggccaagattcctcataccgatggacactttcacccctcaccgctgattggtgggtttgggctgaaacacccgcctcctcaaatttttatcaagaacaccccggtacctgcgaatcctgcaacgaccttcagctctactccggtaaactccttcattactcagtacagcactggccaggtgtcggtgcagattgactgggagatccagaaggagcggtccaaacgctggaaccccgaggtccagtttacctccaactacggacagcaaaactctctgttgtgggctcccgatgcggctgggaaatacactgagcctagggctatcggtacccgctacctcacccaccacctgtaa

SEQ ID NO: 96 - protein, 734 aa, Artificial Sequence; identical to SEQ ID NO: 68
  source: /note="Description of Artificial Sequence: Synthetic polypeptide"

SEQ ID NO: 97 - DNA, 3128 bp, Artificial Sequence
  source: /note="Description of Artificial Sequence: Synthetic polynucleotide"
gaattcgccctttctacggctgcgtcaactggaccaatgagaactttcccttcaacgattgcgtcgacaagatgttgatctggtgggaggagggcaagatgacggccaaggtcgtggagtccgccaaggccattctcggcggcagcaaagtgcgcgtggaccaaaagtgcaagccgtccgcccagatcgaccccacccccgtgatcgtcacctccaacaccaacatgtgcgccgtgattgacgggaacagcaccaccttcgagcaccagcagccgttgcgggaccggatgttcaagtttgaactcacccgccgtctggagcacgactttggcaaggtgacaaagcaggaagtcagagagttcttccgctgggcgcaggatcacgtgaccgaggtggcgcacgagttctacgtcagaaagggtggagccaacaagagacccgcccccgatgacgcggataaaagcgagcccaagcgggcctgcccctcagtcgcggatccatcgacgtcagacgcggaaggagctccggtggactttgccgacaggtaccaaaacaaatgttctcgtcacgcgggcatgcttcagatgctgtttccctgcaaaacatgcgagagaatgaatcagaatttcaacatttgcttcacgcacgggaccagagactgttcagaatgtttccccggcgtgtcagaatctcaaccggtcgtcagaaaaaagacgtatcggaaactctgtgcgattcatcatctgctggggcgggcacccgagattgcttgctcggcctgcgatctggtcaacgtggacctagatgactgtgtttctgagcaataaatgacttaaaccaggtatggctgccgatggttatcttccagattggctcgaggacaacctctctgagggcattcgcgagtggtgggacttgaaacctggagccccgaaacccaaagccaaccagcaaaagcaggacgacggccggggtctggtgcttcctggctacaagtacctcggacccttcaacggactcgacaagggggagcccgtcaacgcggcggacgcagcggccctcgagcacgacaaggcctacgaccagcagctcaaagcgggtgacaatccgtacctgcggtataaccacgccgacgccgagtttcaggagcgtctgcaagaagatacgtcttttgggggcaacctcgggcgagcagtcttccaggccaagaagcgggttctcgaacctctcggtctggttgaggaaggcgctaagacggctcctggaaagaagagaccggtagagccatcaccccagcgttctccagactcctctacgggcatcggcaagaaaggccagcagcccgcgaaaaagagactcaactttgggcagactggcgactcagagtcagtgcccgaccctcaaccaatcggagaaccccccgcaggcccctctggtctgggatctggtacaatggctgcaggcggtggcgctccaatggcagacaataacgaaggcgccgacggagtgggtagttcctcaggaaattggcattgcgattccacatggctgggcgacagagtcatcaccaccagcacccgaacctgggccctccccacctacaacaaccacctctacaagcaaatctccaacgggacttcgggaggaagcaccaacgacaacacctacttcggctacagcaccccctgggggtattttgactttaacagattccactgccacttctcaccacgtgactggcagcgactcatcaacaacaactggggattccggcccaagagactcaacttcaagctcttcaacatccaggtcaaggaggtcacgcagaatgaaggcaccaagaccatcgccaataaccttaccagcacgattcaggtctttacggactcggaataccagctcccgtacgtcctcggctctgcgcaccagggctgcctgcctccgttcccggcggacgtcttcatgattcctcagtacgggtacctgactctgaacaatggcagtcaggccgtgggccgttcctccttctactgcctggagtactttccttctcaaatgctgagaacgggcaacaactttgagttcagctaccagtttgaggacgtgccttttcacagcagctacgcgcacagccaaagcctggaccggctgatgaaccccctcatcgaccagtacctgtactacctgtctcggactcagtccacgggaggtaccgcaggaactcagcagttgctattttctcaggccgggcctaataacatgtcggctcaggccaaaaactggctacccgggccctgctaccggcagcaacgcgtctccacgacactgtcgcaaaataacaacagcaactgtaaatcccggtgtcgctatggcaacccacaaggacgacgaagagcgattttgcctggaccggtgccaccaagtatcatctgaatggcagagactctctgttttccgtccagcggagtcttaatgtttgggaaacagggagctggaaaagacaacgtggactatagcagcgttatgctaaccagtgaggaagaaattaaaaccaccaacccagtggccacggaacagtacggcgtggtggccgataacctgcaacagcaaaacgccgctcctattgtaggggccgtcaacagtcaaggagccttacctggcatggtctggcagaaccgggacgtgtacctgcagggtcctatctgggccaagattcctcacacggacggaaactttcatccctcgccgctgatgggaggctttggactgaaacacccgcctcctcagatcctgattaagaatacacctgttcccgcggatcctccaactaccttcagtcaagctaagctggcgtcgttcatcacgcagtacagcaccggacaggtcagcgtggaaattgaatgggagctgcagaaagaaaacagcaaacgctggaacccagagattcaatacacttccaactactacaaatctacaaatgtggacttcgctgttaacacagatggcacttattctgagcctcgccccattggcacccgttacctcacccgtaatctgtaattgctcgttaatcaataaaccggttgattcgtttcagttgaactttggtctctgcgaagggcgaattc

SEQ ID NO: 98 - protein, 738 aa, Artificial Sequence; identical to SEQ ID NO: 18
  source: /note="Description of Artificial Sequence: Synthetic polypeptide"

SEQ ID NO: 99 - DNA, 3128 bp, Artificial Sequence
  source: /note="Description of Artificial Sequence: Synthetic polynucleotide"
gaattcgccctttctacggctgcgtcaactggaccaatgagaactttcccttcaacgattgcgtcgacaagatggtgatctggtgggaggagggcaagatgacggccaaggtcgtggagtccgccaaggccattctcggcggcagcaaagtgcgcgtggaccaaaagtgcaagtcgtccgcccagatcgaccccacccccgtgatcgtcacctccaacaccaacatgtgcgccgtgattgacgggaacagcaccaccttcgagcaccagcagccgttgcaggaccggatgttcaagtttgaactcacccgccgtctggagcacgactttggcaaggtgacaaagcaggaagtcagagagttcttccgctgggcgcaggatcacgtgaccgaggtggcgcacgagttctacgtcagaaagggtggagccaacaagagacccgcccccgatgacgcggataaaagcgagcccaagcgggcctgcccctcagtcgcggatccatcgacgtcagacgcggaaggagctccggtggactttgccgacaggtaccaaaacaaatgttctcgtcacgcgggcatgcttcagatgctgtttccctgcaaaacatgcgagagaatgaatcagaatttcaacatttgcttcacgcacgggaccagagactgttcagaatgtttccccggcgtgtcagaatctcaaccggttgtcagaaaaaagacgtatcggaaactctgtgcgattcatcatctgctggggcgggcacccgagattgcttgctcggcctgcgatctggtcaacgtggacctagatgactgtgtttctgagcaataaatgacttaaaccaggtatggctgccgatggttatcttccagattggctcgaggacaacctctctgagggcattcgcgagtggtgggacttgaaacctggagccccgaaacccaaagccaaccagcaaaagcaggacgacggccggggtctggtgcttcctggctacaagtacctcggacccttcaacggactcgacaagggggagcccgtcaacgcggcggacgcagcggccctcgagcacgacaaggcctacgaccagcagctcaaagcgggtgacaatccgtacctgcggtataaccacgccgacgccgagtttcaggagcgtctgcaagaagatacgtcttttgggggcaacctcgggcgagcagtcttccaggccaagaagcgggttctcgaacctctcggtctggttgaggaaggcgctaagacggctcctggaaagaagagaccggtagagccatcaccccagcgttctccagactcctctacgggcatcggcaagaaaggccagcagcccgcgaaaaagagactcaactttgggcagactggcgactcagagtcagtgcccgaccctcaaccaatcggagaaccccccgcaggcccctctggtctgggatctggtacaatggctgcaggcggtggcgctccaatggcagacaataacgaaggcgccgacggagtgggtagttcctcaggaaattggcattgcgattccacatggctgggcgacagagtcatcaccaccagcacccgaacctgggccctccccacctacaacaaccacctctacaagcaaatctccaacgggacttcgggaggaagcaccaacgacaacacctacttcggctacagcaccccctgggggtattttgactttaacagattccactgccacttctcaccacgtgactggcagcgactcatcaacaacaactggggattccggcccaagagacccaacttcaagctcttcaacatccaggtcaaggaggtcacgcagaatgaaggcaccaagaccatcgccaataaccttaccagcacgattcaggtctttacggactcggaataccagctcccgtacgtcctcggctctgcgcaccagggctgcctgcctccgttcccggcggacgtcttcatgattcctcagtacgggtacctgactctgaacaatggcagtcaggccgtgggccgttcctccttctactgcctggagtactttccttctcaaatgctgagaacgggcaacaactttgagttcagctaccagtttgaggacgtgccttttcacagcagctacgcgcacagccaaagcctggaccggctgatgaaccccctcatcgaccagtacctgtactacctgtctcggactcagtccacgggaggtaccgcaggaactcagcagttgctattttctcaggccgggcctaataacatgtcggctcaggccaaaaactggctacccgggccctgctaccggcagcaacgcgtctccacgacactgtcgcaaaataacaacagcaactttgcctggaccggtgccaccaagtatcatctgaatggcagagactctctggtaaatcccggtgtcgctatggcaacccacaaggacgacgaagagcgattttttccgtccagcggagtcttaatgtttgggaaacagggagctggaaaagacaacgtggactatagcagcgttatgctaaccagtgaggaagaaattaaaaccaccaacccagtggccacagaacagtacggcgtggtggccgataacctgcaacagcaaaacgccgctcctattgtaggggccgtcaacagtcaaggagccttacctggcatggtctggcagaaccgggacgtgtacctgcagggtcctatctgggccaagattcctcacacggacggaaactttcatccctcgccgctgatgggaggctttggactgaaacacccgcctcctcagatcctgattaagaatacacctgttcccgcggatcctccaactaccttcagtcaagctaagctggcgtcgttcatcacgcagtacagcaccggacaggtcagcgtggaaattgaatgggagctgcagaaagaaaacagcaaacgctggaacccagagattcaatacacttccaactactacaaatctacaaatgtggactttgctgttaacacagatggcacttattctgagcctcgccccattggcacccgttacctcacccgtaatctgtaattgcttgttaatcaataaaccggttgattcgtttcagttgaactttggtctctgcgaagggcgaattc

SEQ ID NO: 100 - protein, 738 aa, Artificial Sequence
  source: /note="Description of Artificial Sequence: Synthetic polypeptide"
MAADGYLPDWLEDNLSEGIREWWDLKPGAPKPKANQQKQDDGRGLVLPGYKYLGPFNGLDKGEPVNAADAAALEHDKAYDQQLKAGDNPYLRYNHADAEFQERLQEDTSFGGNLGRAVFQAKKRVLEPLGLVEEGAKTAPGKKRPVEPSPQRSPDSSTGIGKKGQQPAKKRLNFGQTGDSESVPDPQPIGEPPAGPSGLGSGTMAAGGGAPMADNNEGADGVGSSSGNWHCDSTWLGDRVITTSTRTWALPTYNNHLYKQISNGTSGGSTNDNTYFGYSTPWGYFDFNRFHCHFSPRDWQRLINNNWGFRPKRPNFKLFNIQVKEVTQNEGTKTIANNLTSTIQVFTDSEYQLPYVLGSAHQGCLPPFPADVFMIPQYGYLTLNNGSQAVGRSSFYCLEYFPSQMLRTGNNFEFSYQFEDVPFHSSYAHSQSLDRLMNPLIDQYLYYLSRTQSTGGTAGTQQLLFSQAGPNNMSAQAKNWLPGPCYRQQRVSTTLSQNNNSNFAWTGATKYHLNGRDSLVNPGVAMATHKDDEERFFPSSGVLMFGKQGAGKDNVDYSSVMLTSEEEIKTTNPVATEQYGVVADNLQQQNAAPIVGAVNSQGALPGMVWQNRDVYLQGPIWAKIPHTDGNFHPSPLMGGFGLKHPPPQILIKNTPVPADPPTTFSQAKLASFITQYSTGQVSVEIEWELQKENSKRWNPEIQYTSNYYKSTNVDFAVNTDGTYSEPRPIGTRYLTRNL

SEQ ID NO: 101 - protein, 738 aa, Artificial Sequence
  source: /note="Description of Artificial Sequence: Synthetic polypeptide"
MAADGYLPDWLEDNLSEGIREWWDLKPGAPKPKANQQKQDDGRGLVLPGYKYLGPFNGLDKGEPVNAADAAALEHDKAYDQQLKAGDNPYLRYNHADAEFQERLQEDTSFGGNLGRAVFQAKKRVLEPLGLVEEAAKTAPGKKRPVEPSPQRSPDSSTGIGKKGQQPAKKRLNFGQTGDSESVPDPQPIGEPPAGPSGLGSGTMAAGGGAPMADNNEGADGVGSSSGNWHCDSTWLGDRVITTSTRTWALPTYNNHLYKQISNGTSGGSTNDNTYFGYSTPWGYFDFNRFHCHFSPRDWQRLINNNWGFRPKRLSFKLFNIQVKEVTQNEGTKTIANNLTSTIQVFTDSEYQLPYVLGSAHQGCLPPFPADVFMIPQYGYLTLNNGSQAVGRSSFYCLEYFPSQMLRTGNNFEFSYTFEDVPFHSSYAHSQSLDRLMNPLIDQYLYYLSRTQSTGGTQGTQQLLFSQAGPANMSAQAKNWLPGPCYRQQRVSTTLSQNNNSNFAWTGATKYHLNGRDSLVNPGVAMATHKDDEERFFPSSGVLMFGKQGAGRDNVDYSSVMLTSEEEIKTTNPVATEQYGVVADNLQQTNTGPIVGNVNSQGALPGMVWQNRDVYLQGPIWAKIPHTDGNFHPSPLMGGFGLKHPPPQILIKNTPVPADPPTTFSQAKLASFITQYSTGQVSVEIEWELQKENSKRWNPEIQYTSNYYKSTNVDFAVNTEGTYSEPRPIGTRYLTRNL

SEQ ID NO: 102 - DNA, 2172 bp, Artificial Sequence
  source: /note="Description of Artificial Sequence: Synthetic polynucleotide"
atgtcttttgttgatcaccctccagattggttggaagaagttggtgaaggtcttcgcgagtttttgggccttgaagcgggcccaccgaaaccaaaacccaatcagcagcatcaagatcaagcccgtggtcttgtgctgcctggttataactatctcggacccggaaacggtctcgatcgaggagagcctgtcaacagggcagacgaggtcgcgcgagagcacgacatctcgtacaacgagcagcttgaggcgggagacaacccctacctcaagtacaaccacgcggacgccgagtttcaggagaagctcgccgacgacacatccttcgggggaaacctcggaaaggcagtctttcaggccaagaaaagggttctcgaaccttttggcctggttgaagagggtgctaagacggcccctaccggaaagcggatagacgaccactttccaaaaagaaagaaggctcggaccgaagaggactccaagccttccacctcgtcagacgccgaagctggacccagcggatcccagcagctgcaaatcccagcccaaccagcctcaagtttgggagctgatacaatgtctgcgggaggtggcggcccattgggcgacaataaccaaggtgccgatggagtgggcaatgcctcgggagattggcattgcgattccacgtggatgggggacagagtcgtcaccaagtccacccgaacctgggtgctgcccagctacaacaaccaccagtaccgagagatcaaaagcggctccgtcgacggaagcaacgccaacgcctactttggatacagcaccccctgggggtactttgactttaaccgcttccacagccactggagcccccgagactggcaaagactcatcaacaactactggggcttcagaccccggtccctcagagtcaaaatcttcaacattcaagtcaaagaggtcacggtgcaggactccaccaccaccatcgccaacaacctcacctccaccgtccaagtgtttacggacgacgactaccagctgccctacgtcgtcggcaacgggaccgagggatgcctgccggccttccctccgcaggtctttacgctgccgcagtacggttacgcgacgctgaaccgcgacaacacagaaaatcccaccgagaggagcagcttcttctgcctagagtactttcccagcaagatgctgagaacgggcaacaactttgagtttacctacaactttgaggaggtgcccttccactccagcttcgctcccagtcagaacctgttcaagctggccaacccgctggtggaccagtacttgtaccgcttcgtgagcacaaataacactggcggagtccagttcaacaagaacctggccgggagatacgccaacacctacaaaaactggttcccggggcccatgggccgaacccagggctggaacctgggctccggggtcaaccgcgccagtgtcagcgccttcgccacgaccaataggatggagctcgagggcgcgagttaccaggtgcccccgcagccgaacggcatgaccaacaacctccagggcagcaacacctatgccctggagaacactatgatcttcaacagccagccggcgaacccgggcaccaccgccacgtacctcgagggcaacatgctcatcaccagcgagagcgagacgcagccggtgaaccgcgtggcgtacaacgtcggcgggcagatggccaccaacaaccagagctccaccactgcccccgcgaccggcacgtacaacctccaggaaatcgtgcccggcagcgtgtggatggagagggacgtgtacctccaaggacccatctgggccaagatcccagagacgggggcgcactttcacccctctccggccatgggcggattcggactcaaacacccaccgcccatgatgctcatcaagaacacgcctgtgcccggaaatatcaccagcttctcggacgtgcccgtcagcagcttcatcacccagtacagcaccgggcaggtcaccgtggagatggagtgggagctcaagaaggaaaactccaagaggtggaacccagagatccagtacacaaacaactacaacgacccccagtttgtggactttgccccggacagcaccggggaatacagaaccaccagacctatcggaacccgataccttacccgacccctt

SEQ ID NO: 103 - protein, 720 aa, Artificial Sequence
  source: /note="Description of Artificial Sequence: Synthetic polypeptide"
MSFVDHPPDWLEEVGEGLREFLGLEAGPPKPKPNQQHQDQARGLVLPGYNYLGPGNGLDRGEPVNRADEVAREHDISYNEQLEAGDNPYLKYNHADAEFQEKLADDTSFGGNLGKAVFQAKKRVLEPFGLVEEGAKTAPTGKRIDDHFPKRKKARTEEDSKPSTSSDAEAGPSGSQQLQIPAQPASSLGADTMSAGGGGPLGDNNQGADGVGNASGDWHCDSTWMGDRVVTKSTRTWVLPSYNNHQYREIKSGSVDGSNANAYFGYSTPWGYFDFNRFHSHWSPRDWQRLINNYWGFRPRSLRVKIFNIQVKEVTVQDSTTTIANNLTSTVQVFTDDDYQLPYVVGNGTEGCLPAFPPQVFTLPQYGYATLNRDNTENPTERSSFFCLEYFPSKMLRTGNNFEFTYNFEEVPFHSSFAPSQNLFKLANPLVDQYLYRFVSTNNTGGVQFNKNLAGRYANTYKNWFPGPMGRTQGWNLGSGVNRASVSAFATTNRMELEGASYQVPPQPNGMTNNLQGSNTYALENTMIFNSQPANPGTTATYLEGNMLITSESETQPVNRVAYNVGGQMATNNQSSTTAPATGTYNLQEIVPGSVWMERDVYLQGPIWAKIPETGAHFHPSPAMGGFGLKHPPPMMLIKNTPVPGNITSFSDVPVSSFITQYSTGQVTVEMEWELKKENSKRWNPEIQYTNNYNDPQFVDFAPDSTGEYRTTRPIGTRYL

SEQ ID NO: 104 - protein, 724 aa, Adeno-associated virus 5
MSFVDHPPDWLEEVGEGLREFLGLEAGPPKPKPNQQHQDQARGLVLPGYNYLGPGNGLDRGEPVNRADEVAREHDISYNEQLEAGDNPYLKYNHADAEFQEKLADDTSFGGNLGKAVFQAKKRVLEPFGLVEEGAKTAPTGKRIDDHFPKRKKARTEEDSKPSTSSDAEAGPSGSQQLQIPAQPASSLGADTMSAGGGGPLGDNNQGADGVGNASGDWHCDSTWMGDRVVTKSTRTWVLPSYNNHQYREIKSGSVDGSNANAYFGYSTPWGYFDFNRFHSHWSPRDWQRLINNYWGFRPRSLRVKIFNIQVKEVTVQDSTTTIANNLTSTVQVFTDDDYQLPYVVGNGTEGCLPAFPPQVFTLPQYGYATLNRDNTENPTERSSFFCLEYFPSKMLRTGNNFEFTYNFEEVPFHSSFAPSQNLFKLANPLVDQYLYRFVSTNNTGGVQFNKNLAGRYANTYKNWFPGPMGRTQGWNLGSGVNRASVSAFATTNRMELEGASYQVPPQPNGMTNNLQGSNTYALENTMIFNSQPANPGTTATYLEGNMLITSESETQPVNRVAYNVGGQMATNNQSSTTAPATGTYNLQEIVPGSVWMERDVYLQGPIWAKIPETGAHFHPSPAMGGFGLKHPPPMMLIKNTPVPGNITSFSDVPVSSFITQYSTGQVTVEMEWELKKENSKRWNPEIQYTNNYNDPQFVDFAPDSTGEYRTTRPIGTRYLTRPL

SEQ ID NO: 105 - DNA, 2175 bp, Artificial Sequence
  source: /note="Description of Artificial Sequence: Synthetic polynucleotide"
atgtcttttgttgatcaccctccagattggttggaagaagttggtgaaggtcttcgcgagtttttgggccttgaagcgggcccaccgaaaccaaaacccaatcagcagcatcaagatcaagcccgtggtcttgtgctgcctggttataactatctcggacccggaaacggtctcgatcgaggagagcctgtcaacagggcagacgaggtcgcgcgagagcacgacatctcgtacaacgagcagcttgaggcgggagacaacccctacctcaagtacaaccacgcggacgccgagtttcaggagaagctcgccgacgacacatccttcgggggaaacctcggaaaggcagtctttcaggccaagaaaagggttctcgaaccttttggcctggttgaagagggtgctaagacggcccctaccggaaagcggatagacgaccactttccaaaaagaaagaaggctcggaccgaagaggactccaagccttccacctcgtcagacgccgaagctggacccagcggatcccagcagctgcaaatcccagcccaaccagcctcaagtttgggagctgatacaatgtctgcgggaggtggcggcccattgggcgacaataaccaaggtgccgatggagtgggcaatgcctcgggagattggcattgcgattccacgtggatgggggacagagtcgtcaccaagtccacccgaacctgggtgctgcccagctacaacaaccaccagtaccgagagatcaaaagcggctccgtcgacggaagcaacgccaacgcctactttggatacagcaccccctgggggtactttgactttaaccgcttccacagccactggagcccccgagactggcaaagactcatcaacaactactggggcttcagaccccggtccctcagagtcaaaatcttcaacattcaagtcaaagaggtcacggtgcaggactccaccaccaccatcgccaacaacctcacctccaccgtccaagtgtttacggacgacgactaccagctgccctacgtcgtcggcaacgggaccgagggatgcctgccggccttccctccgcaggtctttacgctgccgcagtacggttacgcgacgctgaaccgcgacaacacagaaaatcccaccgagaggagcagcttcttctgcctagagtactttcccagcaagatgctgagaacgggcaacaactttgagtttacctacaactttgaggaggtgcccttccactccagcttcgctcccagtcagaacctgttcaagctggccaacccgctggtggaccagtacttgtaccgcttcgtgagcacaaataacactggcggagtccagttcaacaagaacctggccgggagatacgccaacacctacaaaaactggttcccggggcccatgggccgaacccagggctggaacctgggctccggggtcaaccgcgccagtgtcagcgccttcgccacgaccaataggatggagctcgagggcgcgagttaccaggtgcccccgcagccgaacggcatgaccaacaacctccagggcagcaacacctatgccctggagaacactatgatcttcaacagccagccggcgaacccgggcaccaccgccacgtacctcgagggcaacatgctcatcaccagcgagagcgagacgcagccggtgaaccgcgtggcgtacaacgtcggcgggcagatggccaccaacaaccagagctccaccactgcccccgcgaccggcacgtacaacctccaggaaatcgtgcccggcagcgtgtggatggagagggacgtgtacctccaaggacccatctgggccaagatcccagagacgggggcgcactttcacccctctccggccatgggcggattcggactcaaacacccaccgcccatgatgctcatcaagaacacgcctgtgcccggaaatatcaccagcttctcggacgtgcccgtcagcagcttcatcacccagtacagcaccgggcaggtcaccgtggagatggagtgggagctcaagaaggaaaactccaagaggtggaacccagagatccagtacacaaacaactacaacgacccccagtttgtggactttgccccggacagcaccggggaatacagaaccaccagacctatcggaacccgataccttacccgacccctttaa

SEQ ID NO: 106 - DNA, 2208 bp, Artificial Sequence
  source: /note="Description of Artificial Sequence: Synthetic polynucleotide"
atggctgccgatggttatcttccagattggctcgaggacaacctctctgagggcattcgcgagtggtgggacttgaaacctggagccccgaaacccaaagccaaccagcaaaagcaggacgacggccggggtctggtgcttcctggctacaagtacctcggacccttcaacggactcgacaagggggagcccgtcaacgcggcggatgcagcggccctcgagcacgacaaggcctacgaccagcagctcaaagcgggtgacaatccgtacctgcggtataaccacgccgacgccgagtttcaggagcgtctgcaagaagatacgtcttttgggggcaacctcgggcgagcagtcttccaggccaagaagagggttctcgaaccttttggtctggttgaggaaggtgctaagacggctcctggaaagaaacgtccggtagagcagtcgccacaagagccagactcctcctcgggcattggcaagacaggccagcagcccgctaaaaagagactcaattttggtcagactggcgactcagagtcagtccccgacccacaacctctcggagaacctccagcaacccccgctgctgtgggacctactacaatggcttcaggcggtggcgcaccaatggcagacaataacgaaggcgccgacggagtgggtaatgcctcaggaaattggcattgcgattccacatggctgggcgacagagtcatcaccaccagcacccgaacatgggccttgcccacctataacaaccacctctacaagcaaatctccagtgcttcaacgggggccagcaacgacaaccactacttcggctacagcaccccctgggggtattttgatttcaacagattccactgccatttctcaccacgtgactggcagcgactcatcaacaacaattggggattccggcccaagagactcaacttcaagctcttcaacatccaagtcaaggaggtcacgacgaatgatggcgtcacgaccatcgctaataaccttaccagcacggttcaagtcttctcggactcggagtaccagttgccgtacgtcctcggctctgcgcaccagggctgcctccctccgttcccggcggacgtgttcatgattccgcagtacggctacctaacgctcaacaatggcagccaggcagtgggacggtcatccttttactgcctggaatatttcccatcgcagatgctgagaacgggcaataactttaccttcagctacaccttcgaggacgtgcctttccacagcagctacgcgcacagccagagcctggaccggctgatgaatcctctcatcgaccagtacctgtattacctgaacagaactcagaatcagtccggaagtgcccaaaacaaggacttgctgtttagccgggggtctccagctggcatgtctgttcagcccaaaaactggctacctggaccctgttaccggcagcagcgcgtttctaaaacaaaaacagacaacaacaacagcaactttacctggactggtgcttcaaaatataaccttaatgggcgtgaatctataatcaaccctggcactgctatggcctcacacaaagacgacaaagacaagttctttcccatgagcggtgtcatgatttttggaaaggagagcgccggagcttcaaacactgcattggacaatgtcatgatcacagacgaagaggaaatcaaagccactaaccccgtggccaccgaaagatttgggactgtggcagtcaatctccagagcagcagcacagaccctgcgaccggagatgtgcatgttatgggagccttacctggaatggtgtggcaagacagagacgtatacctgcagggtcctatttgggccaaaattcctcacacggatggacactttcacccgtctcctctcatgggcggctttggacttaagcacccgcctcctcagatcctcatcaaaaacacgcctgttcctgcgaatcctccggcagagttttcggctacaaagtttgcttcattcatcacccagtattccacaggacaagtgagcgtggagattgaatgggagctgcagaaagaaaacagcaaacgctggaatcccgaagtgcagtatacatctaactatgcaaaatctgccaacgttgatttcactgtggacaacaatggactttatactgagcctcgccccattggcacccgttacctcacccgtcccctg

SEQ ID NO: 107 - protein, 736 aa, Adeno-associated virus 6
MAADGYLPDWLEDNLSEGIREWWDLKPGAPKPKANQQKQDDGRGLVLPGYKYLGPFNGLDKGEPVNAADAAALEHDKAYDQQLKAGDNPYLRYNHADAEFQERLQEDTSFGGNLGRAVFQAKKRVLEPFGLVEEGAKTAPGKKRPVEQSPQEPDSSSGIGKTGQQPAKKRLNFGQTGDSESVPDPQPLGEPPATPAAVGPTTMASGGGAPMADNNEGADGVGNASGNWHCDSTWLGDRVITTSTRTWALPTYNNHLYKQISSASTGASNDNHYFGYSTPWGYFDFNRFHCHFSPRDWQRLINNNWGFRPKRLNFKLFNIQVKEVTTNDGVTTIANNLTSTVQVFSDSEYQLPYVLGSAHQGCLPPFPADVFMIPQYGYLTLNNGSQAVGRSSFYCLEYFPSQMLRTGNNFTFSYTFEDVPFHSSYAHSQSLDRLMNPLIDQYLYYLNRTQNQSGSAQNKDLLFSRGSPAGMSVQPKNWLPGPCYRQQRVSKTKTDNNNSNFTWTGASKYNLNGRESIINPGTAMASHKDDKDKFFPMSGVMIFGKESAGASNTALDNVMITDEEEIKATNPVATERFGTVAVNLQSSSTDPATGDVHVMGALPGMVWQDRDVYLQGPIWAKIPHTDGHFHPSPLMGGFGLKHPPPQILIKNTPVPANPPAEFSATKFASFITQYSTGQVSVEIEWELQKENSKRWNPEVQYTSNYAKSANVDFTVDNNGLYTEPRPIGTRYLTRPL

SEQ ID NO: 108 - protein, 623 aa, Adeno-associated virus 6
MPGFYEIVIKVPSDLDEHLPGISDSFVNWVAEKEWELPPDSDMDLNLIEQAPLTVAEKLQRDFLVQWRRVSKAPEALFFVQFEKGESYFHLHILVETTGVKSMVLGRFLSQIRDKLVQTIYRGIEPTLPNWFAVTKTRNGAGGGNKVVDECYIPNYLLPKTQPELQWAWTNMEEYISACLNLAERKRLVAHDLTHVSQTQEQNKENLNPNSDAPVIRSKTSARYMELVGWLVDRGITSEKQWIQEDQASYISFNAASNSRSQIKAALDNAGKIMALTKSAPDYLVGPAPPADIKTNRIYRILELNGYDPAYAGSVFLGWAQKRFGKRNTIWLFGPATTGKTNIAEAIAHAVPFYGCVNWTNENFPFNDCVDKMVIWWEEGKMTAKVVESAKAILGGSKVRVDQKCKSSAQIDPTPVIVTSNTNMCAVIDGNSTTFEHQQPLQDRMFKFELTRRLEHDFGKVTKQEVKEFFRWAQDHVTEVAHEFYVRKGGANKRPAPDDADKSEPKRACPSVADPSTSDAEGAPVDFADRYQNKCSRHAGMLQMLFPCKTCERMNQNFNICFTHGTRDCSECFPGVSESQPVVRKRTYRKLCAIHHLLGRAPEIACSACDLVNVDLDDCVSEQ

SEQ ID NO: 109 - DNA, 4683 bp, Adeno-associated virus 6
ttggccactccctctctgcgcgctcgctcgctcactgaggccgggcgaccaaaggtcgcccgacgcccgggctttgcccgggcggcctcagtgagcgagcgagcgcgcagagagggagtggccaactccatcactaggggttcctggaggggtggagtcgtgacgtgaattacgtcatagggttagggaggtcctgtattagaggtcacgtgagtgttttgcgacattttgcgacaccatgtggtcacgctgggtatttaagcccgagtgagcacgcagggtctccattttgaagcgggaggtttgaacgcgcagcgccatgccggggttttacgagattgtgattaaggtccccagcgaccttgacgagcatctgcccggcatttctgacagctttgtgaactgggtggccgagaaggaatgggagttgccgccagattctgacatggatctgaatctgattgagcaggcacccctgaccgtggccgagaagctgcagcgcgacttcctggtccagtggcgccgcgtgagtaaggccccggaggccctcttctttgttcagttcgagaagggcgagtcctacttccacctccatattctggtggagaccacgggggtcaaatccatggtgctgggccgcttcctgagtcagattagggacaagctggtgcagaccatctaccgcgggatcgagccgaccctgcccaactggttcgcggtgaccaagacgcgtaatggcgccggaggggggaacaaggtggtggacgagtgctacatccccaactacctcctgcccaagactcagcccgagctgcagtgggcgtggactaacatggaggagtatataagcgcgtgtttaaacctggccgagcgcaaacggctcgtggcgcacgacctgacccacgtcagccagacccaggagcagaacaaggagaatctgaaccccaattctgacgcgcctgtcatccggtcaaaaacctccgcacgctacatggagctggtcgggtggctggtggaccggggcatcacctccgagaagcagtggatccaggaggaccaggcctcgtacatctccttcaacgccgcctccaactcgcggtcccagatcaaggccgctctggacaatgccggcaagatcatggcgctgaccaaatccgcgcccgactacctggtaggccccgctccgcccgccgacattaaaaccaaccgcatttaccgcatcctggagctgaacggctacgaccctgcctacgccggctccgtctttctcggctgggcccagaaaaggttcggaaaacgcaacaccatctggctgtttgggccggccaccacgggcaagaccaacatcgcggaagccatcgcccacgccgtgcccttctacggctgcgtcaactggaccaatgagaactttcccttcaacgattgcgtcgacaagatggtgatctggtgggaggagggcaagatgacggccaaggtcgtggagtccgccaaggccattctcggcggcagcaaggtgcgcgtggaccaaaagtgcaagtcgtccgcccagatcgatcccacccccgtgatcgtcacctccaacaccaacatgtgcgccgtgattgacgggaacagcaccaccttcgagcaccagcagccgttgcaggaccggatgttcaaatttgaactcacccgccgtctggagcatgactttggcaaggtgacaaagcaggaagtcaaagagttcttccgctgggcgcaggatcacgtgaccgaggtggcgcatgagttctacgtcagaaagggtggagccaacaagagacccgcccccgatgacgcggataaaagcgagcccaagcgggcctgcccctcagtcgcggatccatcgacgtcagacgcggaaggagctccggtggactttgccgacaggtaccaaaacaaatgttctcgtcacgcgggcatgcttcagatgctgtttccctgcaaaacatgcgagagaatgaatcagaatttcaacatttgcttcacgcacgggaccagagactgttcagaatgtttccccggcgtgtcagaatctcaaccggtcgtcagaaagaggacgtatcggaaactctgtgccattcatcatctgctggggcgggctcccgagattgcttgctcggcctgcgatctggtcaacgtggatctggatgactgtgtttctgagcaataaatgacttaaaccaggtatggctgccgatggttatcttccagattggctcgaggacaacctctctgagggcattcgcgagtggtgggacttgaaacctggagccccgaaacccaaagccaaccagcaaaagcaggacgacggccggggtctggtgcttcctggctacaagtacctcggacccttcaacggactcgacaagggggagcccgtcaacgcggcggatgcagcggccctcgagcacgacaaggcctacgaccagcagctcaaagcgggtgacaatccgtacctgcggtataaccacgccgacgccgagtttcaggagcgtctgcaagaagatacgtcttttgggggcaacctcgggcgagcagtcttccaggccaagaagagggttctcgaaccttttggtctggttgaggaaggtgctaagacggctcctggaaagaaacgtccggtagagcagtcgccacaagagccagactcctcctcgggcattggcaagacaggccagcagcccgctaaaaagagactcaattttggtcagactggcgactcagagtcagtccccgacccacaacctctcggagaacctccagcaacccccgctgctgtgggacctactacaatggcttcaggcggtggcgcaccaatggcagacaataacgaaggcgccgacggagtgggtaatgcctcaggaaattggcattgcgattccacatggctgggcgacagagtcatcaccaccagcacccgaacatgggccttgcccacctataacaaccacctctacaagcaaatctccagtgcttcaacgggggccagcaacgacaaccactacttcggctacagcaccccctgggggtattttgatttcaacagattccactgccatttctcaccacgtgactggcagcgactcatcaacaacaattggggattccggcccaagagactcaacttcaagctcttcaacatccaagtcaaggaggtcacgacgaatgatggcgtcacgaccatcgctaataaccttaccagcacggttcaagtcttctcggactcggagtaccagttgccgtacgtcctcggctctgcgcaccagggctgcctccctccgttcccggcggacgtgttcatgattccgcagtacggctacctaacgctcaacaatggcagccaggcagtgggacggtcatccttttactgcctggaatatttcccatcgcagatgctgagaacgggcaataactttaccttcagctacaccttcgaggacgtgcctttccacagcagctacgcgcacagccagagcctggaccggctgatgaatcctctcatcgaccagtacctgtattacctgaacagaactcagaatcagtccggaagtgcccaaaacaaggacttgctgtttagccgggggtctccagctggcatgtctgttcagcccaaaaactggctacctggaccctgttaccggcagcagcgcgtttctaaaacaaaaacagacaacaacaacagcaactttacctggactggtgcttcaaaatataaccttaatgggcgtgaatctataatcaaccctggcactgctatggcctcacacaaagacgacaaagacaagttctttcccatgagcggtgtcatgatttttggaaaggagagcgccggagcttcaaacactgcattggacaatgtcatgatcacagacgaagaggaaatcaaagccactaaccccgtggccaccgaaagatttgggactgtggcagtcaatctccagagcagcagcacagaccctgcgaccggagatgtgcatgttatgggagccttacctggaatggtgtggcaagacagagacgtatacctgcagggtcctatttgggccaaaattcctcacacggatggacactttcacccgtctcctctcatgggcggctttggacttaagcacccgcctcctcagatcctcatcaaaaacacgcctgttcctgcgaatcctccggcagagttttcggctacaaagtttgcttcattcatcacccagtattccacaggacaagtgagcgtggagattgaatgggagctgcagaaagaaaacagcaaacgctggaatcccgaagtgcagtatacatctaactatgcaaaatctgccaacgttgatttcactgtggacaacaatggactttatactgagcctcgccccattggcacccgttacctcacccgtcccctgtaattgtgtgttaatcaataaaccggttaattcgtgtcagttgaactttggtctcatgtcgttattatcttatctggtcaccatagcaaccggttacacattaactgcttagttgcgcttcgcgaatacccctagtgatggagttgcccactccctctatgcgcgctcgctcgctcggtggggccggcagagcagagctctgccgtctgcggacctttggtccgcaggccccaccgagcgagcgagcgcgcatagagggagtgggcaa

SEQ ID NO: 110 - DNA, 2211 bp, Artificial Sequence
  source: /note="Description of Artificial Sequence: Synthetic polynucleotide"
atggctgccgatggttatcttccagattggctcgaggacaacctctctgagggcattcgcgagtggtgggacttgaaacctggagccccgaaacccaaagccaaccagcaaaagcaggacgacggccggggtctggtgcttcctggctacaagtacctcggacccttcaacggactcgacaagggggagcccgtcaacgcggcggatgcagcggccctcgagcacgacaaggcctacgaccagcagctcaaagcgggtgacaatccgtacctgcggtataaccacgccgacgccgagtttcaggagcgtctgcaagaagatacgtcttttgggggcaacctcgggcgagcagtcttccaggccaagaagagggttctcgaaccttttggtctggttgaggaaggtgctaagacggctcctggaaagaaacgtccggtagagcagtcgccacaagagccagactcctcctcgggcattggcaagacaggccagcagcccgctaaaaagagactcaattttggtcagactggcgactcagagtcagtccccgacccacaacctctcggagaacctccagcaacccccgctgctgtgggacctactacaatggcttcaggcggtggcgcaccaatggcagacaataacgaaggcgccgacggagtgggtaatgcctcaggaaattggcattgcgattccacatggctgggcgacagagtcatcaccaccagcacccgaacatgggccttgcccacctataacaaccacctctacaagcaaatctccagtgcttcaacgggggccagcaacgacaaccactacttcggctacagcaccccctgggggtattttgatttcaacagattccactgccatttctcaccacgtgactggcagcgactcatcaacaacaattggggattccggcccaagagactcaacttcaagctcttcaacatccaagtcaaggaggtcacgacgaatgatggcgtcacgaccatcgctaataaccttaccagcacggttcaagtcttctcggactcggagtaccagttgccgtacgtcctcggctctgcgcaccagggctgcctccctccgttcccggcggacgtgttcatgattccgcagtacggctacctaacgctcaacaatggcagccaggcagtgggacggtcatccttttactgcctggaatatttcccatcgcagatgctgagaacgggcaataactttaccttcagctacaccttcgaggacgtgcctttccacagcagctacgcgcacagccagagcctggaccggctgatgaatcctctcatcgaccagtacctgtattacctgaacagaactcagaatcagtccggaagtgcccaaaacaaggacttgctgtttagccgggggtctccagctggcatgtctgttcagcccaaaaactggctacctggaccctgttaccggcagcagcgcgtttctaaaacaaaaacagacaacaacaacagcaactttacctggactggtgcttcaaaatataaccttaatgggcgtgaatctataatcaaccctggcactgctatggcctcacacaaagacgacaaagacaagttctttcccatgagcggtgtcatgatttttggaaaggagagcgccggagcttcaaacactgcattggacaatgtcatgatcacagacgaagaggaaatcaaagccactaaccccgtggccaccgaaagatttgggactgtggcagtcaatctccagagcagcagcacagaccctgcgaccggagatgtgcatgttatgggagccttacctggaatggtgtggcaagacagagacgtatacctgcagggtcctatttgggccaaaattcctcacacggatggacactttcacccgtctcctctcatgggcggctttggacttaagcacccgcctcctcagatcctcatcaaaaacacgcctgttcctgcgaatcctccggcagagttttcggctacaaagtttgcttcattcatcacccagtattccacaggacaagtgagcgtggagattgaatgggagctgcagaaagaaaacagcaaacgctggaatcccgaagtgcagtatacatctaactatgcaaaatctgccaacgttgatttcactgtggacaacaatggactttatactgagcctcgccccattggcacccgttacctcacccgtcccctgtaa

SEQ ID NO: 111 - protein, 736 aa, Artificial Sequence; identical to SEQ ID NO: 107
  source: /note="Description of Artificial Sequence: Synthetic polypeptide"

SEQ ID NO: 112 - protein, 736 aa, Artificial Sequence
  source: /note="Description of Artificial Sequence: Synthetic polypeptide"
MAADGYLPDWLEDNLSEGIREWWDLKPGAPKPKANQQKQDDGRGLVLPGYKYLGPFNGLDKGEPVNAADAAALEHDKAYDQQLKAGDNPYLRYNHADAEFQERLQEDTSFGGNLGRAVFQAKKRVLEPFGLVEEGAKTAPGKKRPVEQSPQEPDSSSGIGKTGQQPAKKRLNFGQTGDSESVPDPQPLGEPPATPAAVGPTTMASGGGAPMADNNEGADGVGNASGNWHCDSTWLGDRVITTSTRTWALPTYNNHLYKQISSASTGASNDNHYFGYSTPWGYFDFNRFHCHFSPRDWQRLINNNWGFRPKRLNFKLFNIQVKEVTTNDGVTTIANNLTSTVQVFSDSEYQLPYVLGSAHQGCLPPFPADVFMIPQYGYLTLNNGSQAVGRSSFYCLEYFPSQMLRTGNNFTFSYTFEDVPFHSSYAHSQSLDRLMNPLIDQYLYYLNRTQNQSGSAQNKDLLFSRGSPAGMSVQPKNWLPGPCYRQQRVSKTKTDNNNSNFTWTGASKYNLNGRESIINPGTAMASHKDDEDKFFPMSGVMIFGKESAGASNTALDNVMITDEEEIKATNPVATERFGTVAVNLQSSSTDPATGDVHVMGALPGMVWQDRDVYLQGPIWAKIPHTDGHFHPSPLMGGFGLKHPPPQILIKNTPVPANPPAEFSATKFASFITQYSTGQVSVEIEWELQKENSKRWNPEVQYTSNYAKSANVDFTVDNNGLYTEPRPIGTRYLTRPL

SEQ ID NO: 113 - protein, 736 aa, Artificial Sequence
  source: /note="Description of Artificial Sequence: Synthetic polypeptide"
MAADGYLPDWLEDNLSEGIREWWDLKPGAPKPKANQQKQDDGRGLVLPGYKYLGPFNGLDKGEPVNAADAAALEHDKAYDQQLKAGDNPYLRYNHADAEFQERLQEDTSFGGNLGRAVFQAKKRVLEPLGLVEEGAKTAPGKKRPVEQSPQEPDSSSGIGKTGQQPAKKRLNFGQTGDSESVPDPQPLGEPPATPAAVGPTTMASGGGAPMADNNEGADGVGNASGNWHCDSTWLGDRVITTSTRTWALPTYNNHLYKQISSASTGASNDNHYFGYSTPWGYFDFNRFHCHFSPRDWQRLINNNWGFRPKRLNFKLFNIQVKEVTTNDGVTTIANNLTSTVQVFSDSEYQLPYVLGSAHQGCLPPFPADVFMIPQYGYLTLNNGSQAVGRSSFYCLEYFPSQMLRTGNNFTFSYTFEDVPFHSSYAHSQSLDRLMNPLIDQYLYYLNRTQNQSGSAQNKDLLFSRGSPAGMSVQPKNWLPGPCYRQQRVSKTKTDNNNSNFTWTGASKYNLNGRESIINPGTAMASHKDDEDKFFPMSGVMIFGKESAGASNTALDNVMITDEEEIKATNPVATERFGTVAVNLQSSSTDPATGDVHVMGALPGMVWQDRDVYLQGPIWAKIPHTDGHFHPSPLMGGFGLKHPPPQILIKNTPVPANPPAEFSATKFASFITQYSTGQVSVEIEWELQKENSKRWNPEVQYTSNYAKSANVDFTVDNNGLYTEPRPIGTRYLTRPL

SEQ ID NO: 114 - protein, 736 aa, Artificial Sequence
  source: /note="Description of Artificial Sequence: Synthetic polypeptide"
MAADGYLPDWLEDNLSEGIREWWDLKPGAPKPKANQQKQDDGRGLVLPGYKYLGPFNGLDKGEPVNAADAAALEHDKAYDQQLKAGDNPYLRYNHADAEFQERLQEDTSFGGNLGRAVFQAKKRVLEPLGLVEEGAKTAPGKKRPVEQSPQEPDSSSGIGKTGQQPAKKRLNFGQTGDSESVPDPQPLGEPPATPAAVGPTTMASGGGAPMADNNEGADGVGNASGNWHCDSTWLGDRVITTSTRTWALPTYNNHLYKQISSASTGASNDNHYFGYSTPWGYFDFNRFHCHFSPRDWQRLINNNWGFRPKRLNFKLFNIQVKEVTTNDGVTTIANNLTSTVQVFSDSEYQLPYVLGSAHQGCLPPFPADVFMIPQYGYLTLNNGSQAVGRSSFYCLEYFPSQMLRTGNNFTFSYTFEDVPFHSSYAHSQSLDRLMNPLIDQYLYYLNRTQNQSGSAQNKDLLFSRGSPAGMSVQPKNWLPGPCYRQQRVSKTKTDNNNSNFTWTGASKYNLNGRESIINPGTAMASHKDDKDKFFPMSGVMIFGKESAGASNTALDNVMITDEEEIKATNPVATERFGTVAVNLQSSSTDPATGDVHVMGALPGMVWQDRDVYLQGPIWAKIPHTDGHFHPSPLMGGFGLKHPPPQILIKNTPVPANPPAEFSATKFASFITQYSTGQVSVEIEWELQKENSKRWNPEVQYTSNYAKSANVDFTVDNNGLYTEPRPIGTRYLTRPL

SEQ ID NO: 115 - DNA, 2214 bp, Artificial Sequence
  source: /note="Description of Artificial Sequence: Synthetic polynucleotide"
atggctgccgatggttatcttccagattggctcgaggacaacctctctgagggcattcgcgagtggtgggacctgaaacctggagccccgaaacccaaagccaaccagcaaaagcaggacaacggccggggtctggtgcttcctggctacaagtacctcggacccttcaacggactcgacaagggggagcccgtcaacgcggcggacgcagcggccctcgagcacgacaaggcctacgaccagcagctcaaagcgggtgacaatccgtacctgcggtataaccacgccgacgccgagtttcaggagcgtctgcaagaagatacgtcatttgggggcaacctcgggcgagcagtcttccaggccaagaagcgggttctcgaacctctcggtctggttgaggaaggcgctaagacggctcctgcaaagaagagaccggtagagccgtcacctcagcgttcccccgactcctccacgggcatcggcaagaaaggccagcagcccgccagaaagagactcaatttcggtcagactggcgactcagagtcagtccccgaccctcaacctctcggagaacctccagcagcgccctctagtgtgggatctggtacagtggctgcaggcggtggcgcaccaatggcagacaataacgaaggtgccgacggagtgggtaatgcctcaggaaattggcattgcgattccacatggctgggcgacagagtcattaccaccagcacccgaacctgggccctgcccacctacaacaaccacctctacaagcaaatctccagtgaaactgcaggtagtaccaacgacaacacctacttcggctacagcaccccctgggggtattttgactttaacagattccactgccacttctcaccacgtgactggcagcgactcatcaacaacaactggggattccggcccaagaagctgcggttcaagctcttcaacatccaggtcaaggaggtcacgacgaatgacggcgttacgaccatcgctaataaccttaccagcacgattcaggtattctcggactcggaataccagctgccgtacgtcctcggctctgcgcaccagggctgcctgcctccgttcccggcggacgtcttcatgattcctcagtacggctacctgactctcaacaatggcagtcagtctgtgggacgttcctccttctactgcctggagtacttcccctctcagatgctgagaacgggcaacaactttgagttcagctacagcttcgaggacgtgcctttccacagcagctacgcacacagccagagcctggaccggctgatgaatcccctcatcgaccagtacttgtactacctggccagaacacagagtaacccaggaggcacagctggcaatcgggaactgcagttttaccagggcgggccttcaactatggccgaacaagccaagaattggttacctggaccttgcttccggcaacaaagagtctccaaaacgctggatcaaaacaacaacagcaactttgcttggactggtgccaccaaatatcacctgaacggcagaaactcgttggttaatcccggcgtcgccatggcaactcacaaggacgacgaggaccgctttttcccatccagcggagtcctgatttttggaaaaactggagcaactaacaaaactacattggaaaatgtgttaatgacaaatgaagaagaaattcgtcctactaatcctgtagccacggaagaatacgggatagtcagcagcaacttacaagcggctaatactgcagcccagacacaagttgtcaacaaccagggagccttacctggcatggtctggcagaaccgggacgtgtacctgcagggtcccatctgggccaagattcctcacacggatggcaactttcacccgtctcctttgatgggcggctttggacttaaacatccgcctcctcagatcctgatcaagaacactcccgttcccgctaatcctccggaggtgtttactcctgccaagtttgcttcgttcatcacacagtacagcaccggacaagtcagcgtggaaatcgagtgggagctgcagaaggaaaacagcaagcgctggaacccggagattcagtacacctccaactttgaaaagcagactggtgtggactttgccgttgacagccagggtgtttactctgagcctcgccctattggcactcgttacctcacccgtaatctgtaa

SEQ ID NO: 116 - protein, 738 aa, Artificial Sequence
  source: /note="Description of Artificial Sequence: Synthetic polypeptide"
MAADGYLPDWLEDNLSEGIREWWALKPGAPKPKANQQKQDDGRGLVLPGYKYLGPFNGLDKGEPVNAADAAALEHDKAYDQQLQAGDNPYLRYNHADAEFQERLQEDTSFGGNLGRAVFQAKKRVLEPLGLVEEGAKTAPGKKRPVEPSPQRSPDSSTGIGKKGQQPARKRLNFGQTGDSESVPDPQPLGEPPAAPSGVGPNTMAAGGGAPMADNNEGADGVGSSSGNWHCDSTWLGDRVITTSTRTWALPTYNNHLYKQISNGTSGGATNDNTYFGYSTPWGYFDFNRFHCHFSPRDWQRLINNNWGFRPKRLSFKLFNIQVKEVTQNEGTKTIANNLTSTIQVFTDSEYQLPYVLGSAHQGCLPPFPADVFMIPQYGYLTLNNGSQAVGRSSFYCLEYFPSQMLRTGNNFQFTYTFEDVPFHSSYAHSQSLDRLMNPLIDQYLYYLSRTQTTGGTANTQTLGFSQGGPNTMANQAKNWLPGPCYRQQRVSTTTGQNNNSNFAWTAGTKYHLNGRNSLANPGIAMATHKDDEERFFPSNGILIFGKQNAARDNADYSDVMLTSEEEIKTTNPVATEEYGIVADNLQQQNTAPQIGTVNSQGALPGMVWQNRDVYLQGPIWAKIPHTDGNFHPSPLMGGFGLKHPPPQILIKNTPVPADPPTTFNQSKLNSFITQYSTGQVSVEIEWELQKENSKRWNPEIQYTSNYYKSTSVDFAVNTEGVYSEPRPIGTRYLTRNL

SEQ ID NO: 117 - protein, 737 aa, Adeno-associated virus 7
MAADGYLPDWLEDNLSEGIREWWDLKPGAPKPKANQQKQDNGRGLVLPGYKYLGPFNGLDKGEPVNAADAAALEHDKAYDQQLKAGDNPYLRYNHADAEFQERLQEDTSFGGNLGRAVFQAKKRVLEPLGLVEEGAKTAPAKKRPVEPSPQRSPDSSTGIGKKGQQPARKRLNFGQTGDSESVPDPQPLGEPPAAPSSVGSGTVAAGGGAPMADNNEGADGVGNASGNWHCDSTWLGDRVITTSTRTWALPTYNNHLYKQISSETAGSTNDNTYFGYSTPWGYFDFNRFHCHFSPRDWQRLINNNWGFRPKKLRFKLFNIQVKEVTTNDGVTTIANNLTSTIQVFSDSEYQLPYVLGSAHQGCLPPFPADVFMIPQYGYLTLNNGSQSVGRSSFYCLEYFPSQMLRTGNNFEFSYSFEDVPFHSSYAHSQSLDRLMNPLIDQYLYYLARTQSNPGGTAGNRELQFYQGGPSTMAEQAKNWLPGPCFRQQRVSKTLDQNNNSNFAWTGATKYHLNGRNSLVNPGVAMATHKDDEDRFFPSSGVLIFGKTGATNKTTLENVLMTNEEEIRPTNPVATEEYGIVSSNLQAANTAAQTQVVNNQGALPGMVWQNRDVYLQGPIWAKIPHTDGNFHPSPLMGGFGLKHPPPQILIKNTPVPANPPEVFTPAKFASFITQYSTGQVSVEIEWELQKENSKRWNPEIQYTSNFEKQTGVDFAVDSQGVYSEPRPIGTRYLTRNL

SEQ ID NO: 118 - protein, 623 aa, Adeno-associated virus 7
MPGFYEIVIKVPSDLDEHLPGISDSFVNWVAEKEWELPPDSDMDLNLIEQAPLTVAEKLQRDFLVQWRRVSKAPEALFFVQFEKGESYFHLHVLVETTGVKSMVLGRFLSQIREKLVQTIYRGVEPTLPNWFAVTKTRNGAGGGNKVVDECYIPNYLLPKTQPELQWAWTNMEEYISACLNLAERKRLVAQHLTHVSQTQEQNKENLNPNSDAPVIRSKTSARYMELVGWLVDRGITSEKQWIQEDQASYISFNAASNSRSQIKAALDNAGKIMALTKSAPDYLVGPSLPADIKTNRIYRILELNGYDPAYAGSVFLGWAQKKFGKRNTIWLFGPATTGKTNIAEAIAHAVPFYGCVNWTNENFPFNDCVDKMVIWWEEGKMTAKVVESAKAILGGSKVRVDQKCKSSAQIDPTPVIVTSNTNMCAVIDGNSTTFEHQQPLQDRMFKFELTRRLEHDFGKVTKQEVKEFFRWASDHVTEVAHEFYVRKGGASKRPAPDDADISEPKRACPSVADPSTSDAEGAPVDFADRYQNKCSRHAGMIQMLFPCKTCERMNQNFNICFTHGVRDCLECFPGVSESQPVVRKKTYRKLCAIHHLLGRAPEIACSACDLVNVDLDDCVSEQ

SEQ ID NO: 119 - DNA, 4721 bp, Adeno-associated virus 7
ttggccactccctctatgcgcgctcgctcgctcggtggggcctgcggaccaaaggtccgcagacggcagagctctgctctgccggccccaccgagcgagcgagcgcgcatagagggagtggccaactccatcactaggggtaccgcgaagcgcctcccacgctgccgcgtcagcgctgacgtaaatcacgtcataggggagtggtcctgtattagctgtcacgtgagtgcttttgcgacattttgcgacaccacgtggccatttgaggtatatatggccgagtgagcgagcaggatctccattttgaccgcgaaatttgaacgagcagcagccatgccgggtttctacgagatcgtgatcaaggtgccgagcgacctggacgagcacctgccgggcatttctgactcgtttgtgaactgggtggccgagaaggaatgggagctgcccccggattctgacatggatctgaatctgatcgagcaggcacccctgaccgtggccgagaagctgcagcgcgacttcctggtccaatggcgccgcgtgagtaaggccccggaggccctgttctttgttcagttcgagaagggcgagagctacttccaccttcacgttctggtggagaccacgggggtcaagtccatggtgctaggccgcttcctgagtcagattcgggagaagctggtccagaccatctaccgcggggtcgagcccacgctgcccaactggttcgcggtgaccaagacgcgtaatggcgccggcggggggaacaaggtggtggacgagtgctacatccccaactacctcctgcccaagacccagcccgagctgcagtgggcgtggactaacatggaggagtatataagcgcgtgtttgaacctggccgaacgcaaacggctcgtggcgcagcacctgacccacgtcagccagacgcaggagcagaacaaggagaatctgaaccccaattctgacgcgcccgtgatcaggtcaaaaacctccgcgcgctacatggagctggtcgggtggctggtggaccggggcatcacctccgagaagcagtggatccaggaggaccaggcctcgtacatctccttcaacgccgcctccaactcgcggtcccagatcaaggccgcgctggacaatgccggcaagatcatggcgctgaccaaatccgcgcccgactacctggtggggccctcgctgcccgcggacattaaaaccaaccgcatctaccgcatcctggagctgaacgggtacgatcctgcctacgccggctccgtctttctcggctgggcccagaaaaagttcgggaagcgcaacaccatctggctgtttgggcccgccaccaccggcaagaccaacattgcggaagccatcgcccacgccgtgcccttctacggctgcgtcaactggaccaatgagaactttcccttcaacgattgcgtcgacaagatggtgatctggtgggaggagggcaagatgacggccaaggtcgtggagtccgccaaggccattctcggcggcagcaaggtgcgcgtggaccaaaagtgcaagtcgtccgcccagatcgaccccacccccgtgatcgtcacctccaacaccaacatgtgcgccgtgattgacgggaacagcaccaccttcgagcaccagcagccgttgcaggaccggatgttcaaatttgaactcacccgccgtctggagcacgactttggcaaggtgacgaagcaggaagtcaaagagttcttccgctgggccagtgatcacgtgaccgaggtggcgcatgagttctacgtcagaaagggcggagccagcaaaagacccgcccccgatgacgcggatataagcgagcccaagcgggcctgcccctcagtcgcggatccatcgacgtcagacgcggaaggagctccggtggactttgccgacaggtaccaaaacaaatgttctcgtcacgcgggcatgattcagatgctgtttccctgcaaaacgtgcgagagaatgaatcagaatttcaacatttgcttcacacacggggtcagagactgtttagagtgtttccccggcgtgtcagaatctcaaccggtcgtcagaaaaaagacgtatcggaaactctgcgcgattcatcatctgctggggcgggcgcccgagattgcttgctcggcctgcgacctggtcaacgtggacctggacgactgcgtttctgagcaataaatgacttaaaccaggtatggctgccgatggttatcttccagattggctcgaggacaacctctctgagggcattcgcgagtggtgggacctgaaacctggagccccgaaacccaaagccaaccagcaaaagcaggacaacggccggggtctggtgcttcctggctacaagtacctcggacccttcaacggactcgacaagggggagcccgtcaacgcggcggacgcagcggccctcgagcacgacaaggcctacgaccagcagctcaaagcgggtgacaatccgtacctgcggtataaccacgccgacgccgagtttcaggagcgtctgcaagaagatacgtcatttgggggcaacctcgggcgagcagtcttccaggccaagaagcgggttctcgaacctctcggtctggttgaggaaggcgctaagacggctcctgcaaagaagagaccggtagagccgtcacctcagcgttcccccgactcctccacgggcatcggcaagaaaggccagcagcccgccagaaagagactcaatttcggtcagactggcgactcagagtcagtccccgaccctcaacctctcggagaacctccagcagcgccctctagtgtgggatctggtacagtggctgcaggcggtggcgcaccaatggcagacaataacgaaggtgccgacggagtgggtaatgcctcaggaaattggcattgcgattccacatggctgggcgacagagtcattaccaccagcacccgaacctgggccctgcccacctacaacaaccacctctacaagcaaatctccagtgaaactgcaggtagtaccaacgacaacacctacttcggctacagcaccccctgggggtattttgactttaacagattccactgccacttctcaccacgtgactggcagcgactcatcaacaacaactggggattccggcccaagaagctgcggttcaagctcttcaacatccaggtcaaggaggtcacgacgaatgacggcgttacgaccatcgctaataaccttaccagcacgattcaggtattctcggactcggaataccagctgccgtacgtcctcggctctgcgcaccagggctgcctgcctccgttcccggcggacgtcttcatgattcctcagtacggctacctgactctcaacaatggcagtcagtctgtgggacgttcctccttctactgcctggagtacttcccctctcagatgctgagaacgggcaacaactttgagttcagctacagcttcgaggacgtgcctttccacagcagctacgcacacagccagagcctggaccggctgatgaatcccctcatcgaccagtacttgtactacctggccagaacacagagtaacccaggaggcacagctggcaatcgggaactgcagttttaccagggcgggccttcaactatggccgaacaagccaagaattggttacctggaccttgcttccggcaacaaagagtctccaaaacgctggatcaaaacaacaacagcaactttgcttggactggtgccaccaaatatcacctgaacggcagaaactcgttggttaatcccggcgtcgccatggcaactcacaaggacgacgaggaccgctttttcccatccagcggagtcctgatttttggaaaaactggagcaactaacaaaactacattggaaaatgtgttaatgacaaatgaagaagaaattcgtcctactaatcctgtagccacggaagaatacgggatagtcagcagcaacttacaagcggctaatactgcagcccagacacaagttgtcaacaaccagggagccttacctggcatggtctggcagaaccgggacgtgtacctgcagggtcccatctgggccaagattcctcacacggatggcaactttcacccgtctcctttgatgggcggctttggacttaaacatccgcctcctcagatcctgatcaagaacactcccgttcccgctaatcctccggaggtgtttactcctgccaagtttgcttcgttcatcacacagtacagcaccggacaagtcagcgtggaaatcgagtgggagctgcagaaggaaaacagcaagcgctggaacccggagattcagtacacctccaactttgaaaagcagactggtgtggactttgccgttgacagccagggtgtttactctgagcctcgccctattggcactcgttacctcacccgtaatctgtaattgcatgttaatcaataaaccggttgattcgtttcagttgaactttggtctcctgtgcttcttatcttatcggtttccatagcaactggttacacattaactgcttgggtgcgcttcacgataagaacactgacgtcaccgcggtacccctagtgatggagttggccactccctctatgcgcgctcgctcgctcggtggggcctgcggaccaaaggtccgcagacggcagagctctgctctgccggccccaccgagcgagcgagcgcgcatagagggagtggccaa

SEQ ID NO: 120 - DNA, 2214 bp, Artificial Sequence; identical to SEQ ID NO: 115
  source: /note="Description of Artificial Sequence: Synthetic polynucleotide"

SEQ ID NO: 121 - protein, 737 aa, Artificial Sequence; identical to SEQ ID NO: 117
  source: /note="Description of Artificial Sequence: Synthetic polypeptide"

SEQ ID NO: 122 - DNA, 2217 bp, Artificial Sequence
  source: /note="Description of Artificial Sequence: Synthetic polynucleotide"
atggctgccgatggttatcttccagattggctcgaggacaacctctctgagggcattcgcgagtggtgggcgctgaaacctggagccccgaagcccaaagccaaccagcaaaagcaggacgacggccggggtctggtgcttcctggctacaagtacctcggacccttcaacggactcgacaagggggagcccgtcaacgcggcggacgcagcggccctcgagcacgacaaggcctacgaccagcagctgcaggcgggtgacaatccgtacctgcggtataaccacgccgacgccgagtttcaggagcgtctgcaagaagatacgtcttttgggggcaacctcgggcgagcagtcttccaggccaagaagcgggttctcgaacctctcggtctggttgaggaaggcgctaagacggctcctggaaagaagagaccggtagagccatcaccccagcgttctccagactcctctacgggcatcggcaagaaaggccaacagcccgccagaaaaagactcaattttggtcagactggcgactcagagtcagttccagaccctcaacctctcggagaacctccagcagcgccctctggtgtgggacctaatacaatggctgcaggcggtggcgcaccaatggcagacaataacgaaggcgccgacggagtgggtagttcctcgggaaattggcattgcgattccacatggctgggcgacagagtcatcaccaccagcacccgaacctgggccctgcccacctacaacaaccacctctacaagcaaatctccaacgggacatcgggaggagccaccaacgacaacacctacttcggctacagcaccccctgggggtattttgactttaacagattccactgccacttttcaccacgtgactggcagcgactcatcaacaacaactggggattccggcccaagagactcagcttcaagctcttcaacatccaggtcaaggaggtcacgcagaatgaaggcaccaagaccatcgccaataacctcaccagcaccatccaggtgtttacggactcggagtaccagctgccgtacgttctcggctctgcccaccagggctgcctgcctccgttcccggcggacgtgttcatgattccccagtacggctacctaacactcaacaacggtagtcaggccgtgggacgctcctccttctactgcctggaatactttccttcgcagatgctgagaaccggcaacaacttccagtttacttacaccttcgaggacgtgcctttccacagcagctacgcccacagccagagcttggaccggctgatgaatcctctgattgaccagtacctgtactacttgtctcggactcaaacaacaggaggcacggcaaatacgcagactctgggcttcagccaaggtgggcctaatacaatggccaatcaggcaaagaactggctgccaggaccctgttaccgccaacaacgcgtctcaacgacaaccgggcaaaacaacaatagcaactttgcctggactgctgggaccaaataccatctgaatggaagaaattcattggctaatcctggcatcgctatggcaacacacaaagacgacgaggagcgtttttttcccagtaacgggatcctgatttttggcaaacaaaatgctgccagagacaatgcggattacagcgatgtcatgctcaccagcgaggaagaaatcaaaaccactaaccctgtggctacagaggaatacggtatcgtggcagataacttgcagcagcaaaacacggctcctcaaattggaactgtcaacagccagggggccttacccggtatggtctggcagaaccgggacgtgtacctgcagggtcccatctgggccaagattcctcacacggacggcaacttccacccgtctccgctgatgggcggctttggcctgaaacatcctccgcctcagatcctgatcaagaacacgcctgtacctgcggatcctccgaccaccttcaaccagtcaaagctgaactctttcatcacgcaatacagcaccggacaggtcagcgtggaaattgaatgggagctgcagaaggaaaacagcaagcgctggaaccccgagatccagtacacctccaactactacaaatctacaagtgtggactttgctgttaatacagaaggcgtgtactctgaaccccgccccattggcacccgttacctcacccgtaatctgtaa

SEQ ID NO: 123 - DNA, 2213 bp, Adeno-associated virus 8
atggctgccgatggttatcttccagattggctcgaggacaacctctctgagggcattcgcgagtggtgggcgctgaaacctggagccccgaagcccaaagccaaccagcaaaagcaggacgacggccggggtctggtgcttcctggctacaagtacctcggacccttcaacggactcgacaagggggagcccgtcaacgcggcggacgcagcggccctcgagcacgacaaggcctacgaccagcagctgcaggcgggtgacaatccgtacctgcggtataaccacgccgacgccgagtttcaggagcgtctgcaagaagatacgtcttttgggggcaacctcgggcgagcagtcttccaggccaagaagcgggttctcgaacctctcggtctggttgaggaaggcgctaagacggctcctggaaagaagagaccggtagagccatcaccccagcgttctccagactcctctacgggcatcggcaagaaaggccaacagcccgccagaaaaagactcaattttggtcagactggcgactcagagtcagttccagaccctcaacctctcggagaacctccagcagcgccctctggtgtgggacctaatacaatggctgcaggcggtggcgcaccaatggcagacaataacgaaggcgccgacggagtgggtagttcctcgggaaattggcattgcgattccacatggctgggcgacagagtcatcaccaccagcacccgaacctgggccctgcccacctacaacaaccacctctacaagcaaatctccaacgggacatcgggaggagccaccaacgacaacacctacttcggctacagcaccccctgggggtattttgactttaacagattccactgccacttttcaccacgtgactggcagcgactcatcaacaacaactggggattccggcccaagagactcagcttcaagctcttcaacatccaggtcaaggaggtcacgcagaatgaaggcaccaagaccatcgccaataacctcaccagcaccatccaggtgtttacggactcggagtaccagctgccgtacgttctcggctctgcccaccagggctgcctgcctccgttcccggcggacgtgttcatgattccccagtacggctacctaacactcaacaacggtagtcaggccgtgggacgctcctccttctactgcctggaatactttccttcgcagatgctgagaaccggcaacaacttccagtttacttacaccttcgaggacgtgcctttccacagcagctacgcccacagccagagcttggaccggctgatgaatcctctgattgaccagtacctgtactacttgtctcggactcaaacaacaggaggcacggcaaatacgcagactctgggcttcagccaaggtgggcctaatacaatggccaatcaggcaaagaactggctgccaggaccctgttaccgccaacaacgcgtctcaacgacaaccgggcaaaacaacaatagcaactttgcctggactgctgggaccaaataccatctgaatggaagaaattcattggctaatcctggcatcgctatggcaacacacaaagacgacgaggagcgtttttttcccagtaacgggatcctgatttttggcaaacaaaatgctgccagagacaatgcggattacagcgatgtcatgctcaccagcgaggaagaaatcaaaaccactaaccctgtggctacagaggaatacggtatcgtggcagataacttgcagcagcaaaacacggctcctcaaattggaactgtcaacagccagggggccttacccggtatggtctggcagaaccgggacgtgtacctgcagggtcccatctgggccaagattcctcacacggacggcaacttccacccgtctccgctgatgggcggctttggcctgaaacatcctccgcctcagatcctgatcaagaacacgcctgtacctgcggatcctccgaccaccttcaaccagtcaaagctgaactctttcatcacgcaatacagcaccggacaggtcagcgtggaaattgaatgggagctgcagaaggaaaacagcaagcgctggaaccccgagatccagtacacctccaactactacaaatctacaagtgtggactttgctgtaatacagaaggcgtgtactctgaaccccgccccattggcacccgttacctcacccgtaatctg

SEQ ID NO: 124 - DNA, 4393 bp, Adeno-associated virus 8
cagagagggagtggccaactccatcactaggggtagcgcgaagcgcctcccacgctgccgcgtcagcgctgacgtaaattacgtcataggggagtggtcctgtattagctgtcacgtgagtgcttttgcggcattttgcgacaccacgtggccatttgaggtatatatggccgagtgagcgagcaggatctccattttgaccgcgaaatttgaacgagcagcagccatgccgggcttctacgagatcgtgatcaaggtgccgagcgacctggacgagcacctgccgggcatttctgactcgtttgtgaactgggtggccgagaaggaatgggagctgcccccggattctgacatggatcggaatctgatcgagcaggcacccctgaccgtggccgagaagctgcagcgcgacttcctggtccaatggcgccgcgtgagtaaggccccggaggccctcttctttgttcagttcgagaagggcgagagctactttcacctgcacgttctggtcgagaccacgggggtcaagtccatggtgctaggccgcttcctgagtcagattcgggaaaagcttggtccagaccatctacccgcggggtcgagccccaccttgcccaactggttcgcggtgaccaaagacgcggtaatggcgccggcgggggggaacaaggtggtggacgagtgctacatccccaactacctcctgcccaagactcagcccgagctgcagtgggcgtggactaacatggaggagtatataagcgcgtgcttgaacctggccgagcgcaaacggctcgtggcgcagcacctgacccacgtcagccagacgcaggagcagaacaaggagaatctgaaccccaattctgacgcgcccgtgatcaggtcaaaaacctccgcgcgctatatggagctggtcgggtggctggtggaccggggcatcacctccgagaagcagtggatccaggaggaccaggcctcgtacatctccttcaacgccgcctccaactcgcggtcccagatcaaggccgcgctggacaatgccggcaagatcatggcgctgaccaaatccgcgcccgactacctggtggggccctcgctgcccgcggacattacccagaaccgcatctaccgcatcctcgctctcaacggctacgaccctgcctacgccggctccgtctttctcggctgggctcagaaaaagttcgggaaacgcaacaccatctggctgtttggacccgccaccaccggcaagaccaacattgcggaagccatcgcccacgccgtgcccttctacggctgcgtcaactggaccaatgagaactttcccttcaatgattgcgtcgacaagatggtgatctggtgggaggagggcaagatgacggccaaggtcgtggagtccgccaaggccattctcggcggcagcaaggtgcgcgtggaccaaaagtgcaagtcgtccgcccagatcgaccccacccccgtgatcgtcacctccaacaccaacatgtgcgccgtgattgacgggaacagcaccaccttcgagcaccagcagcctctccaggaccggatgtttaagttcgaactcacccgccgtctggagcacgactttggcaaggtgacaaagcaggaagtcaaagagttcttccgctgggccagtgatcacgtgaccgaggtggcgcatgagttttacgtcagaaagggcggagccagcaaaagacccgcccccgatgacgcggataaaagcgagcccaagcgggcctgcccctcagtcgcggatccatcgacgtcagacgcggaaggagctccggtggactttgccgacaggtaccaaaacaaatgttctcgtcacgcgggcatgcttcagatgctgtttccctgcaaaacgtgcgagagaatgaatcagaatttcaacatttgcttcacacacggggtcagagactgctcagagtgtttccccggcgtgtcagaatctcaaccggtcgtcagaaagaggacgtatcggaaactctgtgcgattcatcatctgctggggcgggctcccgagattgcttgctcggcctgcgatctggtcaacgtggacctggatgactgtgtttctgagcaataaatgacttaaaccaggtatggctgccgatggttatcttccagattggctcgaggacaacctctctgagggcattcgcgagtggtgggcgctgaaacctggagccccgaagcccaaagccaaccagcaaaagcaggacgacggccggggtctggtgcttcctggctacaagtacctcggacccttcaacggactcgacaagggggagcccgtcaacgcggcggacgcagcggccctcgagcacgacaaggcctacgaccagcagctgcaggcgggtgacaatccgtacctgcggtataaccacgccgacgccgagtttcaggagcgtctgcaagaagatacgtcttttgggggcaacctcgggcgagcagtcttccaggccaagaagcgggttctcgaacctctcggtctggttgaggaaggcgctaagacggctcctggaaagaagagaccggtagagccatcaccccagcgttctccagactcctctacgggcatcggcaagaaaggccaacagcccgccagaaaaagactcaattttggtcagactggcgactcagagtcagttccagaccctcaacctctcggagaacctccagcagcgccctctggtgtgggacctaatacaatggctgcaggcggtggcgcaccaatggcagacaataacgaaggcgccgacggagtgggtagttcctcgggaaattggcattgcgattccacatggctgggcgacagagtcatcaccaccagcacccgaacctgggccctgcccacctacaacaaccacctctacaagcaaatctccaacgggacatcgggaggagccaccaacgacaacacctacttcggctacagcaccccctgggggtattttgactttaacagattccactgccacttttcaccacgtgactggcagcgactcatcaacaacaactggggattccggcccaagagactcagcttcaagctcttcaacatccaggtcaaggaggtcacgcagaatgaaggcaccaagaccatcgccaataacctcaccagcaccatccaggtgtttacggactcggagtaccagctgccgtacgttctcggctctgcccaccagggctgcctgcctccgttcccggcggacgtgttcatgattccccagtacggctacctaacactcaacaacggtagtcaggccgtgggacgctcctccttctactgcctggaatactttccttcgcagatgctgagaaccggcaacaacttccagtttacttacaccttcgaggacgtgcctttccacagcagctacgcccacagccagagcttggaccggctgatgaatcctctgattgaccagtacctgtactacttgtctcggactcaaacaacaggaggcacggcaaatacgcagactctgggcttcagccaaggtgggcctaatacaatggccaatcaggcaaagaactggctgccaggaccctgttaccgccaacaacgcgtctcaacgacaaccgggcaaaacaacaatagcaactttgcctggactgctgggaccaaataccatctgaatggaagaaattcattggctaatcctggcatcgctatggcaacacacaaagacgacgaggagcgtttttttcccagtaacgggatcctgatttttggcaaacaaaatgctgccagagacaatgcggattacagcgatgtcatgctcaccagcgaggaagaaatcaaaaccactaaccctgtggctacagaggaatacggtatcgtggcagataacttgcagcagcaaaacacggctcctcaaattggaactgtcaacagccagggggccttacccggtatggtctggcagaaccgggacgtgtacctgcagggtcccatctgggccaagattcctcacacggacggcaacttccacccgtctccgctgatgggcggctttggcctgaaacatcctccgcctcagatcctgatcaagaacacgcctgtacctgcggatcctccgaccaccttcaaccagtcaaagctgaactctttcatcacgcaatacagcaccggacaggtcagcgtggaaattgaatgggagctgcagaaggaaaacagcaagcgctggaaccccgagatccagtacacctccaactactacaaatctacaagtgtggactttgctgttaatacagaaggcgtgtactctgaaccccgccccattggcacccgttacctcacccgtaatctgtaattgcctgttaatcaataaaccggttgattcgtttcagttgaactttggtctctgcg

SEQ ID NO: 125 - protein, 738 aa, Adeno-associated virus 8; identical to SEQ ID NO: 116

SEQ ID NO: 126 - protein, 737 aa, Adeno-associated virus 8
MAADGYLPDWLEDNLSEGIREWWALKPGAPKPKANQQKQDDGRGLVLPGYKYLGPFNGLDKGEPVNAADAAALEHDKAYDQQLQAGDNPYLRYNHADAEFQERLQEDTSFGGNLGRAVFQAKKRVLEPLGLVEEGAKTAPGKKRPVEPSPQRSPDSSTGIGKKGQQPARKRLNFGQTGDSESVPDPQPLGEPPAAPSGVGPNTMAAGGGAPMADNNEGADGVGSSSGNWHCDSTWLGDRVITTSTRTWALPTYNNHLYKQISNGTSGGATNDNTYFGYSTPWGYFDFNRFHCHFSPRDWQRLINNNWGFRPKRLSFKLFNIQVKEVTQNEGTKTIANNLTSTIQVFTDSEYQLPYVLGSAHQGCLPPFPADVFMIPQYGYLTLNNGSQAVGRSSFYCLEYFPSQMLRTGNNFQFTYTFEDVPFHSSYAHSQSLDRLMNPLIDQYLYYLSRTQTTGGTANTQTLGFSQGGPNTMANQAKNWLPGPCYRQQRVSTTTGQNNNSNFAWTAGTKYHLNGRNSLANPGIAMATHKDDEERFFPSNGILIFGKQNAARDNADYSDVMLTSEEEIKTTNPVATEEYGIVADNLQQQNTAPQIGTVNSQGALPGMVWQNRDVYLQGPIWAKIPHTDGNFHPSPLMGGFGLKHPPPQILIKNTPVPADPPTTFNQSKLNSFITQYSTGQVSVEIEWELQKENSKRWNPEIQYTSNYYKSTSVDFAVIQKACTLNPAPLAPVTSPVI

SEQ ID NO: 127 - DNA, 2217 bp, Artificial Sequence; identical to SEQ ID NO: 122
  source: /note="Description of Artificial Sequence: Synthetic polynucleotide"

SEQ ID NO: 128 - DNA, 2214 bp, Artificial Sequence
  source: /note="Description of Artificial Sequence: Synthetic polynucleotide"
atggctgccgatggttatcttccagattggctcgaggacaacctctctgagggcattcgcgagtggtgggcgctgaaacctggagccccgaagcccaaagccaaccagcaaaagcaggacgacggccggggtctggtgcttcctggctacaagtacctcggacccttcaacggactcgacaagggggagcccgtcaacgcggcggacgcagcggccctcgagcacgacaaggcctacgaccagcagctgcaggcgggtgacaatccgtacctgcggtataaccacgccgacgccgagtttcaggagcgtctgcaagaagatacgtcttttgggggcaacctcgggcgagcagtcttccaggccaagaagcgggttctcgaacctctcggtctggttgaggaaggcgctaagacggctcctggaaagaagagaccggtagagccatcaccccagcgttctccagactcctctacgggcatcggcaagaaaggccaacagcccgccagaaaaagactcaattttggtcagactggcgactcagagtcagttccagaccctcaacctctcggagaacctccagcagcgccctctggtgtgggacctaatacaatggctgcaggcggtggcgcaccaatggcagacaataacgaaggcgccgacggagtgggtagttcctcgggaaattggcattgcgattccacatggctgggcgacagagtcatcaccaccagcacccgaacctgggccctgcccacctacaacaaccacctctacaagcaaatctccaacgggacatcgggaggagccaccaacgacaacacctacttcggctacagcaccccctgggggtattttgactttaacagattccactgccacttttcaccacgtgactggcagcgactcatcaacaacaactggggattccggcccaagagactcagcttcaagctcttcaacatccaggtcaaggaggtcacgcagaatgaaggcaccaagaccatcgccaataacctcaccagcaccatccaggtgtttacggactcggagtaccagctgccgtacgttctcggctctgcccaccagggctgcctgcctccgttcccggcggacgtgttcatgattccccagtacggctacctaacactcaacaacggtagtcaggccgtgggacgctcctccttctactgcctggaatactttccttcgcagatgctgagaaccggcaacaacttccagtttacttacaccttcgaggacgtgcctttccacagcagctacgcccacagccagagcttggaccggctgatgaatcctctgattgaccagtacctgtactacttgtctcggactcaaacaacaggaggcacggcaaatacgcagactctgggcttcagccaaggtgggcctaatacaatggccaatcaggcaaagaactggctgccaggaccctgttaccgccaacaacgcgtctcaacgacaaccgggcaaaacaacaatagcaactttgcctggactgctgggaccaaataccatctgaatggaagaaattcattggctaatcctggcatcgctatggcaacacacaaagacgacgaggagcgtttttttcccagtaacgggatcctgatttttggcaaacaaaatgctgccagagacaatgcggattacagcgatgtcatgctcaccagcgaggaagaaatcaaaaccactaaccctgtggctacagaggaatacggtatcgtggcagataacttgcctgagcggacggcgatgagtcttccgggaactgtcaacagccagggggccttacccggtatggtctggcagaaccgggacgtgtacctgcagggtcccatctgggccaagattcctcacacggacggcaacttccacccgtctccgctgatgggcggctttggcctgaaacatcctccgcctcagatcctgatcaagaacacgcctgtacctgcggatcctccgaccaccttcaaccagtcaaagctgaactctttcatcacgcaatacagcaccggacaggtcagcgtggaaattgaatgggagctgcagaaggaaaacagcaagcgctggaaccccgagatccagtacacctccaactactacaaatctacaagtgtggactttgctgttaatacagaaggcgtgtactctgaaccccgccccattggcacccgttacctcacccgtaatctg

SEQ ID NO: 129 - protein, 738 aa, Artificial Sequence
  source: /note="Description of Artificial Sequence: Synthetic polypeptide"
MAADGYLPDWLEDNLSEGIREWWALKPGAPKPKANQQKQDDGRGLVLPGYKYLGPFNGLDKGEPVNAADAAALEHDKAYDQQLQAGDNPYLRYNHADAEFQERLQEDTSFGGNLGRAVFQAKKRVLEPLGLVEEGAKTAPGKKRPVEPSPQRSPDSSTGIGKKGQQPARKRLNFGQTGDSESVPDPQPLGEPPAAPSGVGPNTMAAGGGAPMADNNEGADGVGSSSGNWHCDSTWLGDRVITTSTRTWALPTYNNHLYKQISNGTSGGATNDNTYFGYSTPWGYFDFNRFHCHFSPRDWQRLINNNWGFRPKRLSFKLFNIQVKEVTQNEGTKTIANNLTSTIQVFTDSEYQLPYVLGSAHQGCLPPFPADVFMIPQYGYLTLNNGSQAVGRSSFYCLEYFPSQMLRTGNNFQFTYTFEDVPFHSSYAHSQSLDRLMNPLIDQYLYYLSRTQTTGGTANTQTLGFSQGGPNTMANQAKNWLPGPCYRQQRVSTTTGQNNNSNFAWTAGTKYHLNGRNSLANPGIAMATHKDDEERFFPSNGILIFGKQNAARDNADYSDVMLTSEEEIKTTNPVATEEYGIVADNLPERTAMSLPGTVNSQGALPGMVWQNRDVYLQGPIWAKIPHTDGNFHPSPLMGGFGLKHPPPQILIKNTPVPADPPTTFNQSKLNSFITQYSTGQVSVEIEWELQKENSKRWNPEIQYTSNYYKSTSVDFAVNTEGVYSEPRPIGTRYLTRNL

SEQ ID NO: 130 - DNA, 2214 bp, Artificial Sequence
  source: /note="Description of Artificial Sequence: Synthetic polynucleotide"
atggctgccgatggttatcttccagattggctcgaggacaacctctctgagggcattcgcgagtggtgggcgctgaaacctggagccccgaagcccaaagccaaccagcaaaagcaggacgacggccggggtctggtgcttcctggctacaagtacctcggacccttcaacggactcgacaagggggagcccgtcaacgcggcggacgcagcggccctcgagcacgacaaggcctacgaccagcagctgcaggcgggtgacaatccgtacctgcggtataaccacgccgacgccgagtttcaggagcgtctgcaagaagatacgtcttttgggggcaacctcgggcgagcagtcttccaggccaagaagcgggttctcgaacctctcggtctggttgaggaaggcgctaagacggctcctggaaagaagagaccggtagagccatcaccccagcgttctccagactcctctacgggcatcggcaagaaaggccaacagcccgccagaaaaagactcaattttggtcagactggcgactcagagtcagttccagaccctcaacctctcggagaacctccagcagcgccctctggtgtgggacctaatacaatggctgcaggcggtggcgcaccaatggcagacaataacgaaggcgccgacggagtgggtagttcctcgggaaattggcattgcgattccacatggctgggcgacagagtcatcaccaccagcacccgaacctgggccctgcccacctacaacaaccacctctacaagcaaatctccaacgggacatcgggaggagccaccaacgacaacacctacttcggctacagcaccccctgggggtattttgactttaacagattccactgccacttttcaccacgtgactggcagcgactcatcaacaacaactggggattccggcccaagagactcagcttcaagctcttcaacatccaggtcaaggaggtcacgcagaatgaaggcaccaagaccatcgccaataacctcaccagcaccatccaggtgtttacggactcggagtaccagctgccgtacgttctcggctctgcccaccagggctgcctgcctccgttcccggcggacgtgttcatgattccccagtacggctacctaacactcaacaacggtagtcaggccgtgggacgctcctccttctactgcctggaatactttccttcgcagatgctgagaaccggcaacaacttccagtttacttacaccttcgaggacgtgcctttccacagcagctacgcccacagccagagcttggaccggctgatgaatcctctgattgaccagtacctgtactacttgtctcggactcaaacaacaggaggcacggcaaatacgcagactctgggcttcagccaaggtgggcctaatacaatggccaatcaggcaaagaactggctgccaggaccctgttaccgccaacaacgcgtctcaacgacaaccgggcaaaacaacaatagcaactttgcctggactgctgggaccaaataccatctgaatggaagaaattcattggctaatcctggcatcgctatggcaacacacaaagacgacgaggagcgtttttttcccagtaacgggatcctgatttttggcaaacaaaatgctgccagagacaatgcggattacagcgatgtcatgctcaccagcgaggaagaaatcaaaaccactaaccctgtggctacagaggaatacggtatcgtggcagataacttgagttttagtcgtgcggttctttgtgatggaactgtcaacagccagggggccttacccggtatggtctggcagaaccgggacgtgtacctgcagggtcccatctgggccaagattcctcacacggacggcaacttccacccgtctccgctgatgggcggctttggcctgaaacatcctccgcctcagatcctgatcaagaacacgcctgtacctgcggatcctccgaccaccttcaaccagtcaaagctgaactctttcatcacgcaatacagcaccggacaggtcagcgtggaaattgaatgggagctgcagaaggaaaacagcaagcgctggaaccccgagatccagtacacctccaactactacaaatctacaagtgtggactttgctgttaatacagaaggcgtgtactctgaaccccgccccattggcacccgttacctcacccgtaatctg

SEQ ID NO: 131 - protein, 738 aa, Artificial Sequence
  source: /note="Description of Artificial Sequence: Synthetic polypeptide"
MAADGYLPDWLEDNLSEGIREWWALKPGAPKPKANQQKQDDGRGLVLPGYKYLGPFNGLDKGEPVNAADAAALEHDKAYDQQLQAGDNPYLRYNHADAEFQERLQEDTSFGGNLGRAVFQAKKRVLEPLGLVEEGAKTAPGKKRPVEPSPQRSPDSSTGIGKKGQQPARKRLNFGQTGDSESVPDPQPLGEPPAAPSGVGPNTMAAGGGAPMADNNEGADGVGSSSGNWHCDSTWLGDRVITTSTRTWALPTYNNHLYKQISNGTSGGATNDNTYFGYSTPWGYFDFNRFHCHFSPRDWQRLINNNWGFRPKRLSFKLFNIQVKEVTQNEGTKTIANNLTSTIQVFTDSEYQLPYVLGSAHQGCLPPFPADVFMIPQYGYLTLNNGSQAVGRSSFYCLEYFPSQMLRTGNNFQFTYTFEDVPFHSSYAHSQSLDRLMNPLIDQYLYYLSRTQTTGGTANTQTLGFSQGGPNTMANQAKNWLPGPCYRQQRVSTTTGQNNNSNFAWTAGTKYHLNGRNSLANPGIAMATHKDDEERFFPSNGILIFGKQNAARDNADYSDVMLTSEEEIKTTNPVATEEYGIVADNLSFSRAVLCDGTVNSQGALPGMVWQNRDVYLQGPIWAKIPHTDGNFHPSPLMGGFGLKHPPPQILIKNTPVPADPPTTFNQSKLNSFITQYSTGQVSVEIEWELQKENSKRWNPEIQYTSNYYKSTSVDFAVNTEGVYSEPRPIGTRYLTRNL

SEQ ID NO: 132 - DNA, 4385 bp, Adeno-associated virus 9
cagagagggagtggccaactccatcactaggggtaatcgcgaagcgcctcccacgctgccgcgtcagcgctgacgtagattacgtcataggggagtggtcctgtattagctgtcacgtgagtgcttttgcgacattttgcgacaccacatggccatttgaggtatatatggccgagtgagcgagcaggatctccattttgaccgcgaaatttgaacgagcagcagccatgccgggcttctacgagattgtgatcaaggtgccgagcgacctggacgagcacctgccgggcatttctgactcttttgtgaactgggtggccgagaaggaatgggagctgcccccggattctgacatggatcggaatctgatcgagcaggcacccctgaccgtggccgagaagctgcagcgcgacttcctggtccaatggcgccgcgtgagtaaggccccggaggccctcttctttgttcagttcgagaagggcgagagctactttcacctgcacgttctggtcgagaccacgggggtcaagtccatggtgctaggccgcttcctgagtcagattcgggagaagctggtccagaccatctaccgcgggatcgagccgaccctgcccaactggttcgcggtgaccaagacgcgtaatggcgccggcggggggaacaaggtggtggacgagtgctacatccccaactacctcctgcccaagactcagcccgagctgcagtgggcgtggactaacatggaggagtatataagcgcgtgcttgaacctggccgagcgcaaacggctcgtggcgcagcacctgacccacgtcagccagacgcaggagcagaacaaggagaatctgaaccccaattctgacgcgcccgtgatcaggtcaaaaacctccgcgcgctacatggagctggtcgggtggctggtggaccggggcatcacctccgagaagcagtggatccaggaggaccaggcctcgtacatctccttcaacgccgcctccaactcgcggtcccagatcaaggccgcgctggacaatgccggcaagatcatggcgctgaccaaatccgcgcccgactacctggtaggcccttcacttccggtggacattacgcagaaccgcatctaccgcatcctgcagctcaacggctacgaccctgcctacgccggctccgtctttctcggctgggcacaaaagaagttcgggaaacgcaacaccatctggctgtttgggccggccaccacgggaaagaccaacatcgcagaagccattgcccacgccgtgcccttctacggctgcgtcaactggaccaatgagaactttcccttcaacgattgcgtcgacaagatggtgatctggtgggaggagggcaagatgacggccaaggtcgtggagtccgccaaggccattctcggcggcagcaaggtgcgcgtggaccaaaagtgcaagtcgtccgcccagatcgaccccactcccgtgatcgtcacctccaacaccaacatgtgcgccgtgattgacgggaacagcaccaccttcgagcaccagcagcctctccaggaccggatgtttaagttcgaactcacccgccgtctggagcacgactttggcaaggtgacaaagcaggaagtcaaagagttcttccgctgggccagtgatcacgtgaccgaggtggcgcatgagttttacgtcagaaagggcggagccagcaaaagacccgcccccgatgacgcggataaaagcgagcccaagcgggcctgcccctcagtcgcggatccatcgacgtcagacgcggaaggagctccggtggactttgccgacaggtaccaaaacaaatgttctcgtcacgcgggcatgcttcagatgctgcttccctgcaaaacgtgcgagagaatgaatcagaatttcaacatttgcttcacacacggggtcagagactgctcagagtgtttccccggcgtgtcagaatctcaaccggtcgtcagaaagaggacgtatcggaaactctgtgcgattcatcatctgctggggcgggctcccgagattgcttgctcggcctgcgatctggtcaacgtggacctggatgactgtgtttctgagcaataaatgacttaaaccaggtatggctgccgatggttatcttccagattggctcgaggacaacctctctgagggcattcgcgagtggtgggcgctgaaacctggagccccgaagcccaaagccaaccagcaaaagcaggacgacggccggggtctggtgcttcctggctacaagtacctcggacccttcaacggactcgacaagggggagcccgtcaacgcggcggacgcagcggccctcgagcacggcaaggcctacgaccagcagctgcaggcgggtgacaatccgtacctgcggtataaccacgccgacgccgagtttcaggagcgtctgcaagaagatacgtcttttgggggcaacctcgggcgagcagtcttccaggccaagaagcgggttctcgaacctctcggtctggttgaggaaggcgctaagacggctcctggaaagaagagaccggtagagccatcaccccagcgttctccagactcctctacgggcatcggcaagaaaggccaacagcccgccagaaaaagactcaattttggtcagactggcgactcagagtcagttccagaccctcaacctctcggagaacctccagcagcgccctctggtgtgggacctaatacaatggctgcaggcggtggcgcaccaatggcagacaataacgaaggcgccgacggagtgggtaattcctcgggaaattggcattgcgattccacatggctgggggacagagtcatcaccaccagcacccgaacctgggcattgcccacctacaacaaccacctctacaagcaaatctccaatggaacatcgggaggaagcaccaacgacaacacctactttggctacagcaccccctgggggtattttgacttcaacagattccactgccacttctcaccacgtgactggcagcgactcatcaacaacaactggggattccggccaaagagactcaacttcaagctgttcaacatccaggtcaaggaggttacgacgaacgaaggcaccaagaccatcgccaataaccttaccagcaccgtccaggtctttacggactcggagtaccagctaccgtacgtcctaggctctgcccaccaaggatgcctgccaccgtttcctgcagacgtcttcatggttcctcagtacggctacctgacgctcaacaatggaagtcaagcgttaggacgttcttctttctactgtctggaatacttcccttctcagatgctgagaaccggcaacaactttcagttcagctacactttcgaggacgtgcctttccacagcagctacgcacacagccagagtctagatcgactgatgaaccccctcatcgaccagtacctatactacctggtcagaacacagacaactggaactgggggaactcaaactttggcattcagccaagcaggccctagctcaatggccaatcaggctagaaactgggtacccgggccttgctaccgtcagcagcgcgtctccacaaccaccaaccaaaataacaacagcaactttgcgtggacgggagctgctaaattcaagctgaacgggagagactcgctaatgaatcctggcgtggctatggcatcgcacaaagacgacgaggaccgcttctttccatcaagtggcgttctcatatttggcaagcaaggagccgggaacgatggagtcgactacagccaggtgctgattacagatgaggaagaaattaaagccaccaaccctgtagccacagaggaatacggagcagtggccatcaacaaccaggccgctaacacgcaggcgcaaactggacttgtgcataaccagggagttattcctggtatggtctggcagaaccgggacgtgtacctgcagggccctatttgggctaaaatacctcacacagatggcaactttcacccgtctcctctgatgggtggatttggactgaaacacccacctccacagattctaattaaaaatacaccagtgccggcagatcctcctcttaccttcaatcaagccaagctgaactctttcatcacgcagtacagcacgggacaagtcagcgtggaaatcgagtgggagctgcagaaagaaaacagcaagcgctggaatccagagatccagtatacttcaaactactacaaatctacaaatgtggactttgctgtcaataccaaaggtgtttactctgagcctcgccccattggtactcgttacctcacccgtaatttgtaattgcctgttaatcaataaaccggttaattcgtttcagttgaactttggtctctgcg

SEQ ID NO: 133 - DNA, 4382 bp, Adeno-associated virus 9
cagagagggagtggccaactccatcactaggggtaatcgcgaagcgcctcccacgctgccgcgtcagcgctgacgtagattacgtcataggggagtggtcctgtattagctgtcacgtgagtgcttttgcgacattttgcgacaccacatggccatttgaggtatatatggccgagtgagcgagcaggatctccattttgaccgcgaaatttgaacgagcagcagccatgccgggcttctacgagattgtgatcaaggtgccgagcgacctggacgagcacctgccgggcatttctgactcttttgtgaactgggtggccgagaaggaatgggagctgcccccggattctgacatggatcggaatctgatcgagcaggcacccctgaccgtggccgagaagctgtagcgcgacttcctggtccaatggcgccgcgtgagtaaggccccggaggccctcttctttgttcagttcgagaagggcgagagctactttcacctgcacgttctggtcgagaccacgggggtcaagtccatggtgctaggccgcttcctgagtcagattcgggagaagctggtccagaccatctaccgcgggatcgagccgaccctgcccaactggttcgcggtgaccaagacgcgtaatggcgccggcggggggaacaaggtggtggacgagtgctacatccccaactacctcctgcccaagactcagcccgagctgcagtgggcgtggactaacatggaggagtatataagcgcgtgcttgaacctggccgagcgcaaacggctcgtggcgcagcacctgacccacgtcagccagacgcaggagcagaacaaggagaatctgaaccccaattctgacgcgcccgtgatcaggtcaaaaacctccgcgcgctacatggagctggtcgggtggctggtggaccggggcatcacctccgagaagcagtggatccaggaggaccaggcctcgtacatctccttcaacgccgcctccaactcgcggtcccagatcaaggccgcgctggacaatgccggcaagatcatggcgctgaccaaatccgcgcccgactacctggtaggcccttcacttccggtggacattacgcagaaccgcatctaccgcatcctgcagctcaacggctacgaccctgcctacgccggctccgtctttctcggctgggcacaaaagaagttcgggaaacgcaacaccatctggctgtttgggccggccaccacgggaaagaccaacatcgcagaagccattgcccacgccgtgcccttctacggctgcgtcaactggaccaatgagaactttcccttcaacgattgcgtcgacaagatggtgatctggtgggaggagggcaagatgacggccaaggtcgtggagtccgccaaggccattctcggcggcagcaaggtgcgcgtggaccaaaagtgcaagtcgtccgcccagatcgaccccactcccgtgatcgtcacctccaacaccaacatgtgcgccgtgattgacgggaacagcaccaccttcgagcaccagcagcctctccaggaccggatgtttaagttcgaactcacccgccgtctggagcacgactttggcaaggtgacaaagcaggaagtcaaagagttcttccgctgggccagtgatcacgtgaccgaggtggcgcatgagttttacgtcagaaagggcggagccagcaaaagacccgcccccgatgacgcggataaaagcgagcccaagcgggcctgcccctcagtcgcggatccatcgacgtcagacgcggaaggagctccggtggactttgccgacaggtaccaaaacaaatgttctcgtcacgcgggcatgcttcagatgctgcttccctgcaaaacgtgcgagagaatgaatcagaatttcaacatttgcttcacacacggggtcagagactgctcagagtgtttccccggcgtgtcagaatctcaaccggtcgtcagaaagaggacgtatcggaaactctgtgcgattcatcatctgctggggcgggctcccgagattgcttgctcggcctgcgatctggtcaacgtggacctggatgactgtgtttctgagcaataaatgacttaaaccaggtatggctgccgatggttatcttccagattggctcgaggacaacctctctgagggcattcgcgagtggtgggacctgaaacctggagccccgaaacccaaagccaaccagcaaaagcaggacgacggccggggtctggtgcttcctggctacaagtacctcggacccttcaacggactcgacaagggggagcccgtcaacgcggcggacgcagcggccctcgagcacgacaaggcctacgaccagcagctcaaagcgggtgacaatccgtacctgcggtataaccacgccgacgccgagtttcaggagcgtctgcaagaagatacgtcttttgggggcaacctcgggcgagcagtcttccaggccaagaagcgggttctcgaacctctcggtctggttgaggaaggcgctaagacggctcctggaaagaagagaccggtagagcagtcaccccaagaaccagactcatcctcgggcatcggcaaatcaggccagcagcccgctaaaaagagactcaattttggtcagactggcgactcagagtcagtccccgacccacaacctctcggagaacctccagaagccccctcaggtctgggacctaatacaatggcttcaggcggtggcgctccaatggcagacaataacgaaggcgccgacggagtgggtaattcctcgggaaattggcattgcgattccacatggctgggggacagagtcatcaccaccagcacccgaacctgggcattgcccacctacaacaaccacctctacaagcaaatctccaatggaacatcgggaggaagcaccaacgacaacacctactttggctacagcaccccctgggggtattttgacttcaacagattccactgccacttctcaccacgtgactggcagcgactcatcaacaacaactggggattccggccaaagagactcaacttcaagctgttcaacatccaggtcaaggaggttacgacgaacgaaggcaccaagaccatcgccaataaccttaccagcaccgtccaggtctttacggactcggagtaccagctaccgtacgtcctaggctctgcccaccaaggatgcctgccaccgtttcctgcagacgtcttcatggttcctcagtacggctacctgacgctcaacaatggaagtcaagcgttaggacgttcttctttctactgtctggaatacttcccttctcagatgctgagaaccggcaacaactttcagttcagctacactttcgaggacgtgcctttccacagcagctacgcacacagccagagtctagatcgactgatgaaccccctcatcgaccagtacctatactacctggtcagaacacagacaactggaactgggggaactcaaactttggcattcagccaagcaggccctagctcaatggccaatcaggctagaaactgggtacccgggccttgctaccgtcagcagcgcgtctccacaaccaccaaccaaaataacaacagcaactttgcgtggacgggagctgctaaattcaagctgaacgggagagactcgctaatgaatcctggcgtggctatggcatcgcacaaagacgacgaggaccgcttctttccatcaagtggcgttctcatatttggcaagcaaggagccgggaacgatggagtcgactacagccaggtgctgattacagatgaggaagaaattaaagccaccaaccctgtagccacagaggaatacggagcagtggccatcaacaaccaggccgctaacacgcaggcgcaaactggacttgtgcataaccagggagttattcctggtatggtctggcagaaccgggacgtgtacctgcagggccctatttgggctaaaatacctcacacagatggcaactttcacccgtctcctctgatgggtggatttggactgaaacacccacctccacagattctaattaaaaatacaccagtgccggcagatcctcctcttaccttcaatcaagccaagctgaactctttcatcacgcagtacagcacgggacaagtcagcgtggaaatcgagtgggagctgcagaaagaaaacagcaagcgctggaatccagagatccagtatacttcaaactactacaaatctacaaatgtggactttgctgtcaataccgaaggtgtttactctgagcctcgccccattggtactcgttacctcacccgtaatttgtaattgcctgttaatcaataaaccggttaattcgtttcagttgaactttggtctctgcg

SEQ ID NO: 134 - protein, 736 aa, Adeno-associated virus 9
MAADGYLPDWLEDNLSEGIREWWALKPGAPQPKANQQHQDNARGLVLPGYKYLGPGNGLDKGEPVNAADAAALEHDKAYDQQLKAGDNPYLKYNHADAEFQERLKEDTSFGGNLGRAVFQAKKRLLEPLGLVEEAAKTAPGKKRPVEQSPQEPDSSAGIGKSGAQPAKKRLNFGQTGDTESVPDPQPIGEPPAAPSGVGSLTMASGGGAPVADNNEGADGVGSSSGNWHCDSQWLGDRVITTSTRTWALPTYNNHLYKQISNSTSGGSSNDNAYFGYSTPWGYFDFNRFHCHFSPRDWQRLINNNWGFRPKRLNFKLFNIQVKEVTDNNGVKTIANNLTSTVQVFTDSDYQLPYVLGSAHEGCLPPFPADVFMIPQYGYLTLNDGSQAVGRSSFYCLEYFPSQMLRTGNNFQFSYEFENVPFHSSYAHSQSLDRLMNPLIDQYLYYLSKTINGSGQNQQTLKFSVAGPSNMAVQGRNYIPGPSYRQQRVSTTVTQNNNSEFAWPGASSWALNGRNSLMNPGPAMASHKEGEDRFFPLSGSLIFGKQGTGRDNVDADKVMITNEEEIKTTNPVATESYGQVATNHQSAQAQAQTGWVQNQGILPGMVWQDRDVYLQGPIWAKIPHTDGNFHPSPLMGGFGMKHPPPQILIKNTPVPADPPTAFNKDKLNSFITQYSTGQVSVEIEWELQKENSKRWNPEIQYTSNYYKSNNVEFAVNTEGVYSEPRPIGTRYLTRNL

SEQ ID NO: 135 - protein, 736 aa, Adeno-associated virus 9
MAADGYLPDWLEDNLSEGIREWWDLKPGAPKPKANQQKQDDGRGLVLPGYKYLGPFNGLDKGEPVNAADAAALEHDKAYDQQLKAGDNPYLRYNHADAEFQERLQEDTSFGGNLGRAVFQAKKRVLEPLGLVEEGAKTAPGKKRPVEQSPQEPDSSSGIGKSGQQPAKKRLNFGQTGDSESVPDPQPLGEPPEAPSGLGPNTMASGGGAPMADNNEGADGVGNSSGNWHCDSTWLGDRVITTSTRTWALPTYNNHLYKQISNGTSGGSTNDNTYFGYSTPWGYFDFNRFHCHFSPRDWQRLINNNWGFRPKRLNFKLFNIQVKEVTTNEGTKTIANNLTSTVQVFTDSEYQLPYVLGSAHQGCLPPFPADVFMVPQYGYLTLNNGSQALGRSSFYCLEYFPSQMLRTGNNFQFSYTFEDVPFHSSYAHSQSLDRLMNPLIDQYLYYLVRTQTTGTGGTQTLAFSQAGPSSMANQARNWVPGPCYRQQRVSTTTNQNNNSNFAWTGAAKFKLNGRDSLMNPGVAMASHKDDEDRFFPSSGVLIFGKQGAGNDGVDYSQVLITDEEEIKATNPVATEEYGAVAINNQAANTQAQTGLVHNQGVIPGMVWQNRDVYLQGPIWAKIPHTDGNFHPSPLMGGFGLKHPPPQILIKNTPVPADPPLTFNQAKLNSFITQYSTGQVSVEIEWELQKENSKRWNPEIQYTSNYYKSTNVDFAVNTEGVYSEPRPIGTRYLTRNL

SEQ ID NO: 136 - protein, 623 aa, Adeno-associated virus 9
MPGFYEIVIKVPSDLDEHLPGISDSFVNWVAEKEWELPPDSDMDRNLIEQAPLTVAEKLQRDFLVQWRRVSKAPEALFFVQFEKGESYFHLHVLVETTGVKSMVLGRFLSQIREKLVQTIYRGIEPTLPNWFAVTKTRNGAGGGNKVVDECYIPNYLLPKTQPELQWAWTNMEEYISACLNLAERKRLVAQHLTHVSQTQEQNKENLNPNSDAPVIRSKTSARYMELVGWLVDRGITSEKQWIQEDQASYISFNAASNSRSQIKAALDNAGKIMALTKSAPDYLVGPSLPVDITQNRIYRILQLNGYDPAYAGSVFLGWAQKKFGKRNTIWLFGPATTGKTNIAEAIAHAVPFYGCVNWTNENFPFNDCVDKMVIWWEEGKMTAKVVESAKAILGGSKVRVDQKCKSSAQIDPTPVIVTSNTNMCAVIDGNSTTFEHQQPLQDRMFKFELTRRLEHDFGKVTKQEVKEFFRWASDHVTEVAHEFYVRKGGASKRPAPDDADKSEPKRACPSVADPSTSDAEGAPVDFADRYQNKCSRHAGMLQMLLPCKTCERMNQNFNICFTHGVRDCSECFPGVSESQPVVRKRTYRKLCAIHHLLGRAPEIACSACDLVNVDLDDCVSEQ

SEQ ID NO: 137 - DNA, 2211 bp, Artificial Sequence
  source: /note="Description of Artificial Sequence: Synthetic polynucleotide"
atggctgccgatggttatcttccagattggctcgaggacaaccttagtgaaggaattcgcgagtggtgggctttgaaacctggagcccctcaacccaaggcaaatcaacaacatcaagacaacgctcgaggtcttgtgcttccgggttacaaataccttggacccggcaacggactcgacaagggggagccggtcaacgcagcagacgcggcggccctcgagcacgacaaggcctacgaccagcagctcaaggccggagacaacccgtacctcaagtacaaccacgccgacgccgagttccaggagcggctcaaagaagatacgtcttttgggggcaacctcgggcgagcagtcttccaggccaaaaagaggcttcttgaacctcttggtctggttgaggaagcggctaagacggctcctggaaagaagaggcctgtagagcagtctcctcaggaaccggactcctccgcgggtattggcaaatcgggtgcacagcccgctaaaaagagactcaatttcggtcagactggcgacacagagtcagtcccagaccctcaaccaatcggagaacctcccgcagccccctcaggtgtgggatctcttacaatggcttcaggtggtggcgcaccagtggcagacaataacgaaggtgccgatggagtgggtagttcctcgggaaattggcattgcgattcccaatggctgggggacagagtcatcaccaccagcacccgaacctgggccctgcccacctacaacaatcacctctacaagcaaatctccaacagcacatctggaggatcttcaaatgacaacgcctacttcggctacagcaccccctgggggtattttgacttcaacagattccactgccacttctcaccacgtgactggcagcgactcatcaacaacaactggggattccggcctaagcgactcaacttcaagctcttcaacattcaggtcaaagaggttacggacaacaatggagtcaagaccatcgccaataaccttaccagcacggtccaggtcttcacggactcagactatcagctcccgtacgtgctcgggtcggctcacgagggctgcctcccgccgttcccagcggacgttttcatgattcctcagtacgggtatctgacgcttaatgatggaagccaggccgtgggtcgttcgtccttttactgcctggaatatttcccgtcgcaaatgctaagaacgggtaacaacttccagttcagctacgagtttgagaacgtacctttccatagcagctacgctcacagccaaagcctggaccgactaatgaatccactcatcgaccaatacttgtactatctctcaaagactattaacggttctggacagaatcaacaaacgctaaaattcagtgtggccggacccagcaacatggctgtccagggaagaaactacatacctggacccagctaccgacaacaacgtgtctcaaccactgtgactcaaaacaacaacagcgaatttgcttggcctggagcttcttcttgggctctcaatggacgtaatagcttgatgaatcctggacctgctatggccagccacaaagaaggagaggaccgtttctttcctttgtctggatctttaatttttggcaaacaaggaactggaagagacaacgtggatgcggacaaagtcatgataaccaacgaagaagaaattaaaactactaacccggtagcaacggagtcctatggacaagtggccacaaaccaccagagtgcccaagcacaggcgcagaccggctgggttcaaaaccaaggaatacttccgggtatggtttggcaggacagagatgtgtacctgcaaggacccatttgggccaaaattcctcacacggacggcaactttcacccttctccgctgatgggagggtttggaatgaagcacccgcctcctcagatcctcatcaaaaacacacctgtacctgcggatcctccaacggccttcaacaaggacaagctgaactctttcatcacccagtattctactggccaagtcagcgtggagatcgagtgggagctgcagaaggaaaacagcaagcgctggaacccggagatccagtacacttccaactattacaagtctaataatgttgaatttgctgttaatactgaaggtgtatatagtgaaccccgccccattggcaccagatacctgactcgtaatctgtaa

SEQ ID NO: 138 - protein, 736 aa, Artificial Sequence; identical to SEQ ID NO: 134
  source: /note="Description of Artificial Sequence: Synthetic polypeptide"

SEQ ID NO: 139 - DNA, 2460 bp, Artificial Sequence
  source: /note="Description of Artificial Sequence: Synthetic polynucleotide"
ggtaattcctccggaaattggcattgcgattccacatggctgggcgaccgagtcattaccaccagcacccggacttgggccctgcccacctacaacaaccacctctacaagcaaatctccagccaatcgggtgccaccaacgacaaccactacttcggctacagcaccccttgggggtattttgatttcaacagattccactgccatttctcaccacgtgactggcagcgactcatcaacaacaactggggattcatggctgccgatggttatcttccagattggctcgaggacactctctctgaaggaatcagacagtggtggaagctcaaacctggcccaccaccgccgaaacctaaccaacaacaccgggacgacagtaggggtcttgtgcttcctgggtacaagtacctcggacccttcaacggactcgacaaaggagagccggtcaacgaggcagacgccgcggccctcgagcacgacaaagcctacgaccaccagctcaagcaaggggacaacccgtacctcaaatacaaccacgcggacgctgaatttcaggagcgtcttcaagaagatacgtctttcgggggcaacctcgggcgagcagtcttccaggccaaaaagagggtactcgagcctcttggtctggttgaggaagctgttaagacggctcctggaaaaaagagacctatagagcagtctcctgcagaaccggactcttcctcgggcatcggcaaatcaggccagcagcccgctaagaaaagactcaattttggtcagactggcgacacagagtcagtcccagaccctcaaccaatcggagaaccccccgcagccccctctggtgtgggatctaatacaatggcttcaggcggtggggcaccaatggcagacaataacgaaggcgccgacggagtgggtaattcctcgggaaattggcattgcgattccacatggatgggcgacagagttatcaccaccagcacaagaacctgggccctccccacctacaataatcacctctacaagcaaatctccagcgaatcgggagccaccaacgacaaccactacttcggctacagcaccccctgggggtattttgactttaacagattccactgtcacttctcaccacgtgactggcagcgactcatcaacaacaactggggatttagacccaagaaactcaatttcaagctcttcaacatccaagtcaaggaggtcacgcagaatgatggaaccacgaccatcgccaataaccttaccagcacggtgcaggtcttcacagactctgagtaccagctgccctacgtcctcggttcggctcaccagggctgccttccgccgttcccagcagacgtcttcatgattcctcagtacggctacttgactctgaacaatggcagccaagcggtaggacgttcttcattctactgtctagagtattttccctctcagatgctgaggacgggaaacaacttcaccttcagctacacttttgaagacgtgcctttccacagcagctacgcgcacagccagagtctggatcggctgatgaatcctctcattgaccagtacctgtattacctgagcaaaactcagggtacaagtggaacaacgcagcaatcgagactgcagttcagccaagctgggcctagctccatggctcagcaggccaaaaactggctaccgggacccagctaccgacagcagcgaatgtctaagacggctaatgacaacaacaacagtgaatttgcttggactgcagccaccaaatattacctgaatggaagaaattctctggtcaatcccgggcccccaatggccagtcacaaggacgatgaggaaaagtatttccccatgcacggaaatctcatctttggaaaacaaggcacaggaactaccaatgtggacattgaatcagtgcttattacagacgaagaagaaatcagaacaactaatcctgtggctacagaacaatacggacaggttgccaccaaccatcagagtcagaacaccacagcttcctatggaagtgtggacagccagggaatcttacctggaatggtgtggcaggaccgcgatgtctatcttcaaggtcccatttgggccaaaactcctcacacggacggacactttcatccttctccgctcatgggaggctttggactgaaacaccctcctccccagatcctgatcaaaaacacacctgtgccagcgaatcccgcgaccactttcactcctggaaagtttgcttcgttcattacccagtattccaccggacaggtcagcgtggaaatagagtgggagctgcagaaagaaaacagcaaacgctggaacccagaaattcagtacacctccaactacaacaagtcggtgaatgtggagtttaccgtggacgcaaacggtgtttattctgaaccccgccctattggcactcgttaccttacccggaacttg

SEQ ID NO: 140 - DNA, 3123 bp, Artificial Sequence
  source: /note="Description of Artificial Sequence: Synthetic polynucleotide"
gaattcgccctttctacggctgcgtcaactggaccaatgaaaactttcccttcaacgattgcgtcgacaagatggtgatctggtgggaggagggaaagatgaccgccaaggtcgtggaatctgccaaagccattctgggtggaggcaaggttcgtgtggaccagaaatgcaagtcttcggcccagatcgacccgactccggtgattgtcacctctaacaccaacatgtgcgccgtgattgacggaaactcgaccaccttcgagcaccagcagccgttgcaagaccggatgttcaaatttgaacttacccgccgtttggatcatgactttgggaaggtcaccaagcaggaagtcaaagactttttccggtgggctcaagatcacgtgactgaggtggagcatgagttctacgtcaaaaagggtggagccaagaaaaggcccgcccccgatgatgtatatataaatgagcccaagcgggcgcgcgagtcagttgcgcagccatcgacgtcagacgcggaagcttcgataaactacgcggacaggtaccaaaacaaatgttctcgtcacgtgggcatgaatctgatgctgtttccctgtcgacaatgcgaaagaatgaatcagaattcaaatatctgcttcacacacgggcaaaaagactgtttggaatgctttcccgtgtcagaatctcaacccgtttctgtcgtcagaaaaacgtatcagaaactttgttacattcatcatatcatgggaaaagtaccagacgcctgcactgcctgcgacctggtaaatgtggacttggatgactgtatttctgagcaataaatgacttaaatcaggtatggctgctgacggttatcttccagattggctcgaggacactctctctgaaggaatcagacagtggtggaagctcaaacctggcccaccaccgccgaaacctaaccaacaacaccgggacgacagtaggggtcttgtgcttcctgggtacaagtacctcggacccttcaacggactcgacaaaggagagccggtcaacgaggcagacgccgcggccctcgagcacgacaaagcctacgaccaccagctcaagcaaggggacaacccgtacctcaaatacaaccacgcggacgctgaatttcaggagcgtcttcaagaagatacgtctttcgggggcaacctcgggcgagcagtcttccaggccaaaaagagggtactcgagcctcttggtctggttgaggaagctgttaagacggctcctggaaaaaagagacctatagagcagtctcctgcagaaccggactcttcctcgggcatcggcaaatcaggccagcagcccgctaagaaaagactcaattttggtcagactggcgacacagagtcagtcccaggccctcaaccaatcggagaaccccccgcagccccctctggtgtgggatctaatacaatggcttcaggcggtggggcaccaatggcagacaataacgaaggcgccgacggagtgggtaattcctcgggaaattggcattgcgattccacatggatgggcgacagagttatcaccaccagcacaagaacctgggccctccccacctacaataatcacctctacaagcaaatctccagcgaatcgggagccaccaacgacaaccactacttcggctacagcaccccctgggggtattttgactttaacagattccactgtcacttctcaccacgtgactggcagcgactcatcaacaacaactggggatttagacccaagaaactcaatttcaagctcttcaacatccaagtcaaggaggtcacgcagaatgatggaaccacgaccatcgccaataaccttaccagcgcggtgcaggtcttcacagactctgagtaccagctgccctacgtcctcggttcggctcaccagggctgccttccgccgttcccagcagacgtcttcatgattcctcagtacggctacttgactctgaacaatggcagccaagcggtaggacgttcttcattctactgtctagagtattttccctctcagatgctgaggacgggaaacaacttcaccttcagctacacttttgaagacgtgcctttccacagcagctacgcgcacagccagagtctggatcggctgatgaatcctctcattgaccagtacctgtattacctgagcaaaactcagggtacaagtggaacaacgcagcaatcgagactgcagttcagccaagctgggcctagctccatggctcagcaggccaaaaactggctaccgggacccagctaccgacagcagcgaatgtctaagacggctaatgacaacaacaacagtgaatttgcttggactgcagccaccaaatattacctgaatggaagaaattctctggtcaatcccgggcccccagtggccagtcacaaggacgatgaggaaaagtatttccccatgcacggaaatctcatctttggaaaacaaggcacaggaactaccaatgtggacattgaatcagtgcttattacagacgaagaagaaatcagaacaactaatcctgtggctacagaacaatacggacaggttgccaccaaccatcagagtcagaacaccacagcttcctatggaagtgtggacagccagggaatcttacctggaatggtgtggcaggaccgcgatgtctatcttcaaggtcccatttgggccaaaactcctcacacggacggacactttcatccttctccgctcatgggaggctttggactgaaacaccctcctccccagatcctgatcaaaaacacacctgtgccagcgaatcccgcgaccactttcactcctggaaagtttgcttcgttcattacccagtattccacctgacaggtcagcgtggaaatagagtgggagctgcagaaagaaaacagcaaacgctggaacccagaaattcagtacacctccaactacaacaagtcggtgaatgtggagtttaccgtggacgcaaacggtgtttattctgaaccccgccctattggcactcgttaccttacccggaacttgtaatttcctgttaatgaataagccgatttatgcgtttcagttgaactttggtctctgcgaagggcgaattcgtttaaacct

SEQ ID NO: 141 - protein, 735 aa, Artificial Sequence
  source: /note="Description of Artificial Sequence: Synthetic polypeptide"
MAADGYLPDWLEDTLSEGIRQWWKLKPGPPPPKPNQQHRDDSRGLVLPGYKYLGPFNGLDKGEPVNEADAAALEHDKAYDHQLKQGDNPYLKYNHADAEFQERLQEDTSFGGNLGRAVFQAKKRVLEPLGLVEEAVKTAPGKKRPIEQSPAEPDSSSGIGKSGQQPAKKRLNFGQTGDTESVPGPQPIGEPPAAPSGVGSNTMASGGGAPMADNNEGADGVGNSSGNWHCDSTWMGDRVITTSTRTWALPTYNNHLYKQISSESGATNDNHYFGYSTPWGYFDFNRFHCHFSPRDWQRLINNNWGFRPKKLNFKLFNIQVKEVTQNDGTTTIANNLTSAVQVFTDSEYQLPYVLGSAHQGCLPPFPADVFMIPQYGYLTLNNGSQAVGRSSFYCLEYFPSQMLRTGNNFTFSYTFEDVPFHSSYAHSQSLDRLMNPLIDQYLYYLSKTQGTSGTTQQSRLQFSQAGPSSMAQQAKNWLPGPSYRQQRMSKTANDNNNSEFAWTAATKYYLNGRNSLVNPGPPVASHKDDEEKYFPMHGNLIFGKQGTGTTNVDIESVLITDEEEIRTTNPVATEQYGQVATNHQSQNTTASYGSVDSQGILPGMVWQDRDVYLQGPIWAKTPHTDGHFHPSPLMGGFGLKHPPPQILIKNTPVPANPATTFTPGKFASFITQYSTGQVSVEIEWELQKENSKRWNPEIQYTSNYNKSVNVEFTVDANGVYSEPRPIGTRYLTRNL

SEQ ID NO: 142 - DNA, 3123 bp, Artificial Sequence
  source: /note="Description of Artificial Sequence: Synthetic polynucleotide"
gaattcgccctttctacggctgcgtcaactggaccaatgaaaactttcccttcaacgattgcgtcgacaagatggtgatctggtgggaggagggaaagatgaccgccaaggtcgtggaatctgccaaagccattctgggtggaagcaaggttcgtgtggaccagaaatgcaagtcttcggcccagatcgacccgactccggtgattgtcacctctaacaccaacatgtgcgccgtgattgacggaaactcgaccaccttcgagcaccagcagccgttgcaagaccggatgttcaaatttgaacttacccgccgtttggatcatgactttgggaaggtcaccaagcaggaagtcaaagactttttccggtgggctcaagatcacgtgactgaggtggagcatgagttctacgtcaaaaagggtggagccaagaaaaggcccgcccccgatgatgtatatataaatgagcccaagcgggcgcgcgagtcagttgcgcagccatcgacgtcagacgcggaagcttcgataaactacgcgggcaggtaccaaaacaaatgttctcgtcacgtgggcatgaatctgatgctgtttccctgtcgacaatgcgaaagaatgaatcagaattcaaatatctgcttcacacacgggcaaaaagactgtttggaatgctttcccgtgtcagaatctcaacccgtttctgtcgtcagaaaaacgtatcagaaactttgttacattcatcatatcatgggaaaagaaccagacgcctgcactgcctgcgacctggtaaatgtggacttggatgactgtatttctgagcaataaatgacttaaatcaggtatggctgctgacggttatcttccagattggctcgaggacactctctctgaaggaatcagacagtggtggaagctcaaacctggcccaccaccgccgaaacctaaccaacaacaccgggacgacagtaggggtcttgtgcttcctgggtacaagtacctcggacccttcaacggactcgacaaaggagagccggtcaacgaggcagacgccgcggccctcgagcacgacaaagcctacgaccaccagctcaagcaaggggacaacccgtacctcaaatacaaccacgcggacgctgaatttcaggagcgtcttcaagaagatacgtctttcgggggcaacctcgggcgagcagtcttccaggccaaaaagagggtactcgagcctcttggtctggttgaggaagctgttaagacggctcctggaaaaaagagacctatagagcagtctcctgcagaaccggactcttcctcgggcatcggcgaatcaggccagcagcccgctaagaaaagactcaattttggtcagactggcgacacagagtcagtcccagaccctcaaccaatcggagaaccccccgcagccccctctggtgtgggatctaatacaatggcttcaggcggtggggcaccaatggcagacgataacgaaggcgccgacggagtgggtaattcctcgggaaattggcattgcgattccacatggatgggcgacagagttatcaccaccagcacaagaacctgggccctccccacctacaataatcacctctacaagcaaatctccagcgaatcgggagccaccaacgacaaccactacttcggctacagcaccccctgggggtattttgactttaacagattccactgtcacttctcaccacgtgactggcagcgactcatcaacaacaactggggatttagacccaagaaactcaatttcaagctcttcaacatccaagtcaaggaggtcacgcagaatgatggaaccacgaccatcgccaataaccttaccagcacggtgcaggtcttcacagactctgagtaccagctgccctacgtcctcggttcggctcaccagggctgccttccgccgttcccagcagacgtcttcatgattcctcagtacggctacttgactctgaacaatggcagccaagcggtaggacgttcttcattctactgtctagagtattttccctctcagatgctgaggacgggaaacaacttcaccttcagctacacttttgaagacgtgcctttccacagcagctacgcgcacagccagagtctggatcggctgatgaatcctctcattgaccagtacctgtattacctgagcaaaactcagggtacaagtggaacaacgcagcaatcgagactgcagttcagccaagctgggcctagctccatggctcagcaggccaaaaactggctaccgggacccagctaccgacagcagcgaatgtctaagacggctaatgacaacaacaacagtgaatttgcttggactgcagccaccaaatattacctgaatggaagaaattctctggtcaatcccgggcccccaatggccagtcacaaggacgatgaggaaaagtatttccccatgcacggaaatctcatctttggaaaacaaggcacaggaactaccaatgtggacattgaatcagtgcttattacagacgaagaagaaatcagaacaactaatcctgtggctacagaacaatacggacaggttgccaccaaccatcagagtcaggacaccacagcttcctatggaagtgtggacagccagggaatcttacctggaatggtgtggcaggaccgcgatgtctatcttcaaggtcccatttgggccaaaactcctcacacggacggacactttcatccttctccgctcatgggaggctttggactgaaacaccctcctccccagatcctgatcaaaaacacacctgtgccagcgaatcccgcgaccactttcactcctggaaagtttgcttcgttcattacccagtattccaccggacaggtcagcgtggaaatagagtgggagctgcagaaagaaaacagcaaacgctggaacccagaaattcagtacacctccaactacaacaagtcggtgaatgtggagtttaccgtggacgcaaacggtgtttattctgaaccccgccctattggcactcgttaccttacccggaacttgtaatttcctgttaatgaataaaccgatttatgcgtttcagttgaactttggtctctgcgaagggcgaattcgcggccgcta

SEQ ID NO: 143 - protein, 735 aa, Artificial Sequence
  source: /note="Description of Artificial Sequence: Synthetic polypeptide"
MAADGYLPDWLEDTLSEGIRQWWKLKPGPPPPKPNQQHRDDSRGLVLPGYKYLGPFNGLDKGEPVNEADAAALEHDKAYDHQLKQGDNPYLKYNHADAEFQERLQEDTSFGGNLGRAVFQAKKRVLEPLGLVEEAVKTAPGKKRPIEQSPAEPDSSSGIGESGQQPAKKRLNFGQTGDTESVPDPQPIGEPPAAPSGVGSNTMASGGGAPMADDNEGADGVGNSSGNWHCDSTWMGDRVITTSTRTWALPTYNNHLYKQISSESGATNDNHYFGYSTPWGYFDFNRFHCHFSPRDWQRLINNNWGFRPKKLNFKLFNIQVKEVTQNDGTTTIANNLTSTVQVFTDSEYQLPYVLGSAHQGCLPPFPADVFMIPQYGYLTLNNGSQAVGRSSFYCLEYFPSQMLRTGNNFTFSYTFEDVPFHSSYAHSQSLDRLMNPLIDQYLYYLSKTQGTSGTTQQSRLQFSQAGPSSMAQQAKNWLPGPSYRQQRMSKTANDNNNSEFAWTAATKYYLNGRNSLVNPGPPMASHKDDEEKYFPMHGNLIFGKQGTGTTNVDIESVLITDEEEIRTTNPVATEQYGQVATNHQSQDTTASYGSVDSQGILPGMVWQDRDVYLQGPIWAKTPHTDGHFHPSPLMGGFGLKHPPPQILIKNTPVPANPATTFTPGKFASFITQYSTGQVSVEIEWELQKENSKRWNPEIQYTSNYNKSVNVEFTVDANGVYSEPRPIGTRYLTRNL

SEQ ID NO: 144 - DNA, 3113 bp, Artificial Sequence
  source: /note="Description of Artificial Sequence: Synthetic polynucleotide"
gaattcgccctttctacggctgcgtcaactggaccaatgaaaactttcccttcaacgattgcgtcgacaagatggtgatctggtgggaggagggaaagatgaccgccaaggtcgtggaatctgccaaagccattctgggtggaagcaaggttcgtgtggaccagaaatgcaagtcttcggcccagatcgacccgactccggtgattgtcacctctaacaccaacatgtgcgccgtgattgacggaaactcgaccaccttcgagcaccagcagccgttgcaagaccggatgttcaaatttgaacttacccgccgtttggatcatgactttgggaaggtcaccaagcaggaagtcaaagactttttccggtgggctcaagatcacgtgactgaggtggagcatgagttctacgtcaaaaagggtggagccaagaaaaggcccgcccccgatgatgtatatataaatgagcccaagcgggcgcgcgagtcagttgcgcagccatcgacgtcagacgcggaagcttcgataaactacgcggacaggtaccaaaacaaatgttctcgtcacgtgggcatgaatctgatgctgtttccctgtcgacaatgcgaaagaatgaatcagaattcaaatatctgcttcacacacgggcaaaaagactgtttggaatgctttcccgtgtcagaatctcaacccgttcctgtcgtcagaaaaacgtatcagaaactttgttacattcatcatatcatgggaaaagtaccagacgcctgcactgcctgcgacctggtaaatgtggacttggatgactgtatttctgagcaataaatgacttaaatcaggtatggctgctgacggttatcttccagattggctcgaggacactctctctgaaggaatcagacagtggtggaagctcaaacctggcccaccaccgccgaaacctaaccaacaacaccgggacgacagtaggggtcttgtgcttcctgggtacaagtacctcggacccttcaacggactcgacaaaggagagccggtcaacgaggcagacgccgcggccctcgagcacgacaaagcctacgaccaccagctcaagcaaggggacaacccgtacctcaaatacaaccacgcggacgctgaatttcaggagcgtcttcaagaagatacgtctttcgggggcaacctcgggcgagcagtcttccaggccaaaaagagggtactcgagcctcttggtctggttgaggaagctgttaagacggctcctggaaaaaagagacctatagagcagtctcctgcagaaccggactcttcctcgggcatcggcaaatcaggccagcagcccgctaagaaaagactcaattttggtcagactggcgacacagagtcagtcccagaccctcaaccaatcggagaaccccccgcagccccctctggtgtgggatctaatacaatggcttcaggcggtggggcaccaatggcagacaataacgaaggcgccgacggagtgggtaattcctcgggaaattggcattgcgattccacatggatgggcgacagagttatcaccaccagcacaagaacctgggccctccccacctacaataatcacctctacaagcaaatctccagcgaatcgggagccaccaacgacaaccactacttcggctacagcaccccctgggggtattttgactttaacagattccactgtcacttctcaccacgtgactggcagcgactcatcaataacaactggggatttagacccaagaaactcaatttcaagctcttcaacatccaagtcaaggaggtcacgcagaatgatggaaccacgaccatcgccaataaccttaccagcacggtgcaggtcttcacagactctgagtaccagctgccctacgtcctcggttcggctcaccagggctgccttccgccgttcccagcagacgtcttcatgattcctcagtacggctacttgactctgaacaatggcagccaagcggtaggacgttcttcattctactgtctagagtattttccctctcagatgctgaggacgggaaacaacttcaccttcagctacacttttgaagacgtgcctttccacagcagctacgcgcacagccagagtctggatcggctgatgaatcctctcattgaccagtacctgtattacctgagcaaaactcagggtacaagtggaacaacgcagcaatcgagactgcagttcaaccaagctgggcctagctccatggctcagcaggccaaaaactggctaccgggacccagctaccgacagcagcgaatgtctaagacggctaatgacaacaacaacagtgaatttgcttggactgcagccaccaaatattacccgaatggaagaaattctctggtcaatcccgggcccccaatggccagtcacaaggacgatgaggaaaagtatttccccatgcacggaaatctcatctttggaaaacaaggcacaggaactaccaatgtggacattgaatcagtgcttattacagacgaagaagaaatcagaacgactaatcctgtggctacagaacaatacggacaggttgccaccaaccgtcagagtcagaacaccacagcttcctatggaagtgtggacagccagggaatcttacctggaatggtgtggcaggaccgcgatgtctatcttcaaggtcccatttgggccaaaactcctcacacggacggacactttcatccttctccgctcatgggaggctttggactgaaacaccctcctccccagatcctgatcaaaaacacacctgtgccagcgaatcccgcgaccactttcactcctggaaagtttgcttcgttcattacccagtattccaccggacaggtcagcgtggaaatagagtgggagctgcagaaagaaaacagcaaacgctggaacccggaaattcagtacacctccaactacaacaagtcggtgaatgtggagtttaccgtggacgcaaacggtgtttattctgaaccccgccctattggcactcgttaccttacccggaacttgtaatttcctgttaatgaataaaccgatttatgcgtttcagttgaactttggtctctgcgaagggcgaattc

SEQ ID NO: 145 - protein, 735 aa, Artificial Sequence
  source: /note="Description of Artificial Sequence: Synthetic polypeptide"
MAADGYLPDWLEDTLSEGIRQWWKLKPGPPPPKPNQQHRDDSRGLVLPGYKYLGPFNGLDKGEPVNEADAAALEHDKAYDHQLKQGDNPYLKYNHADAEFQERLQEDTSFGGNLGRAVFQAKKRVLEPLGLVEEAVKTAPGKKRPIEQSPAEPDSSSGIGKSGQQPAKKRLNFGQTGDTESVPDPQPIGEPPAAPSGVGSNTMASGGGAPMADNNEGADGVGNSSGNWHCDSTWMGDRVITTSTRTWALPTYNNHLYKQISSESGATNDNHYFGYSTPWGYFDFNRFHCHFSPRDWQRLINNNWGFRPKKLNFKLFNIQVKEVTQNDGTTTIANNLTSTVQVFTDSEYQLPYVLGSAHQGCLPPFPADVFMIPQYGYLTLNNGSQAVGRSSFYCLEYFPSQMLRTGNNFTFSYTFEDVPFHSSYAHSQSLDRLMNPLIDQYLYYLSKTQGTSGTTQQSRLQFNQAGPSSMAQQAKNWLPGPSYRQQRMSKTANDNNNSEFAWTAATKYYPNGRNSLVNPGPPMASHKDDEEKYFPMHGNLIFGKQGTGTTNVDIESVLITDEEEIRTTNPVATEQYGQVATNRQSQNTTASYGSVDSQGILPGMVWQDRDVYLQGPIWAKTPHTDGHFHPSPLMGGFGLKHPPPQILIKNTPVPANPATTFTPGKFASFITQYSTGQVSVEIEWELQKENSKRWNPEIQYTSNYNKSVNVEFTVDANGVYSEPRPIGTRYLTRNL

SEQ ID NO: 146 - DNA, 3122 bp, Artificial Sequence
  source: /note="Description of Artificial Sequence: Synthetic polynucleotide"
agcggccgcgaattcgccctttctacggctgcgtcaactggaccaatgaaaactttcccttcaacgattgcgtcgacaagatggtgatctggtgggaggagggaaagatgaccgccaaggtcgtggaatctgccaaagccattctgggtggaagcaaggttcgtgtggaccagaaatgcaggtcttcggcccagatcgacccgactccggtgattgtcacctctaacaccaacatgtgcgccgtgattgacggaaactcgaccaccttcgagcaccagcagccgttgcaagaccggatgttcaaatttgaacttacccgccgtttggatcatgactttgggaaggtcaccaagcaggaagtcaaagactttttccggtgggctcaagatcacgtgactgaggtggagcatgagttctacgtcaaaaagggtggagccaagaaaaggcccgcccccgatgatgtatatataaatgagcccaagcgggcgcgcgagtcagttgcgcagccatcgacgtcagacgcggaagcttcgataaactacgcggacaggtaccaaaacaaatgttctcgtcacgtgggcatgaatctgatgctgtttccctgtcgacaatgcgaaagaatgaatcagaattcaaatatctgcttcacacacgggcaaaaagactgtttggaatgctttcccgtgtcagaatctcaacccgtttctgtcgtcagaaaaacgtatcagaaactttgttacattcatcatatcatgggaaaagtaccagacgcctgcactgcctgcgacctggtaaatgtggacttggatgactgtatttctgagcaataaatgacttaaatcaggtatggctgctgacggttatcttccagattggctcgaggacactctctctgaaggaatcagacagtggtggaagctcaaacctggcccaccaccgccgaaacctaaccaacaacaccgggacgacagtaggggtcttgtgcttcctgggtacaagtacctcggacccttcaacggactcgacaaaggagagccggtcaacgaggcagacgccgcggccctcgagcacgacaaagcctacgaccaccagctcaagcaaggggacaacccgtacctcaaatacaaccacgcggacgctgaatttcaggagcgtcttcaagaagatacgtctttcgggggcaacctcgggcgagcagtcttccaggccaaaaagagggtactcgagcctcttggtctggttgaggaagctgttaagacggctcctggaaaaaagagacctatagagcagtctcctgcagaaccggactcttcctcgggcatcggcaaatcaggccagcagcccgctaagaaaagactcaattttggtcagactggcgacacagagtcagtcccagaccctcaaccaatcggagaaccccccgcagccccctctggtgtgggatctaatacaatggcttcaggcggtggggcaccaatggcagacaataacgaaggcgccgacggagtgggtaattcctcgggaaattggcattgcgattccacatggatgggcgacagagttatcaccaccagcacaagaacctgggccctccccacctacaataatcgcctctacaagcaaatctccagcgaatcgggagccaccaacgacaaccactacttcggctacagcaccccctgggggtattttgactttaacagattccactgtcacttctcaccacgtgactggcagcgactcatcaacaacaactggggatttagacccaagaaactcaatttcaagctcttcaacatccaagtcaaggaggtcacgcagaatgatggaaccacgaccatcgccaataaccttaccagcacggtgcaggtcttcacagactctgagtaccagctgccctacgtcctcggttcggctcaccagggctgccttccgccgttcccagcagacgtcttcatgattcctcagtacggctacttgactctgaacaatggcagccaagcggtaggacgttcttcattctactgtctagagtattttccctctcagatgctgaggacgggaaacaacttcaccttcagctacacttttgaagacgtgcctttccacagcagctacgcgcacagccagagtctggatcggctgatgaatcctctcattgaccagtacctgtattacctgagcaaaactcagggtacaagtggaacaacgcagcaatcgagactgcagttcagccaagctgggcctagctccatggctcagcaggccaaaaactggctaccgggacccagctaccgacagcagcgaatgtctaagacggctaatgacaacaacaacagtgaatttgcttggactgcagccaccaaatattacctgaatggaagaaattctctggtcaatcccgggcccccaatggccagtcacaaggacgatgaggaaaagtatttccccatgcacggaaatctcatctttggaaaacaaggcacaggaactaccaatgtggacattgaatcagtgcttattacagacgaagaagaaatcagaacaactaatcctgtggctacagaacaatacggacaggttgccaccaaccatcagagtcagaacaccacagcttcctatggaagtgtggacagccagggaatcttacctggaatggtgtggcaggaccgcgatgtctatcttcaaggtcccatttgggccaaaactcctcacacggacggacactttcatccttctccgctcatgggaggctttggactgaaacaccctcctccccagatcctgatcaaaaacacacctgtgccagcgaatcccgcgaccactttcactcctggaaagtttgcttcgttcattacccagtattccaccggacaggtcagcgtggaaatagagtgggagctgcagaaagaaaacagcaaacgctggaacccagaaattcagtacacctccaactacaacaagtcggtgaatgtggagtttaccgtggacgcaaacggtgtttattctgaaccccgccctattggcactcgttaccttacccggaacttgtaatttcctgttaatgaataaaccgatttatgcgtttcagttgaactttggtctctgcgaagggcgaattc

SEQ ID NO: 147 - protein, 735 aa, Artificial Sequence
  source: /note="Description of Artificial Sequence: Synthetic polypeptide"
MAADGYLPDWLEDTLSEGIRQWWKLKPGPPPPKPNQQHRDDSRGLVLPGYKYLGPFNGLDKGEPVNEADAAALEHDKAYDHQLKQGDNPYLKYNHADAEFQERLQEDTSFGGNLGRAVFQAKKRVLEPLGLVEEAVKTAPGKKRPIEQSPAEPDSSSGIGKSGQQPAKKRLNFGQTGDTESVPDPQPIGEPPAAPSGVGSNTMASGGGAPMADNNEGADGVGNSSGNWHCDSTWMGDRVITTSTRTWALPTYNNRLYKQISSESGATNDNHYFGYSTPWGYFDFNRFHCHFSPRDWQRLINNNWGFRPKKLNFKLFNIQVKEVTQNDGTTTIANNLTSTVQVFTDSEYQLPYVLGSAHQGCLPPFPADVFMIPQYGYLTLNNGSQAVGRSSFYCLEYFPSQMLRTGNNFTFSYTFEDVPFHSSYAHSQSLDRLMNPLIDQYLYYLSKTQGTSGTTQQSRLQFSQAGPSSMAQQAKNWLPGPSYRQQRMSKTANDNNNSEFAWTAATKYYLNGRNSLVNPGPPMASHKDDEEKYFPMHGNLIFGKQGTGTTNVDIESVLITDEEEIRTTNPVATEQYGQVATNHQSQNTTASYGSVDSQGILPGMVWQDRDVYLQGPIWAKTPHTDGHFHPSPLMGGFGLKHPPPQILIKNTPVPANPATTFTPGKFASFITQYSTGQVSVEIEWELQKENSKRWNPEIQYTSNYNKSVNVEFTVDANGVYSEPRPIGTRYLTRNL

SEQ ID NO: 148 - DNA, 3121 bp, Artificial Sequence
  source: /note="Description of Artificial Sequence: Synthetic polynucleotide"
gaattcgcccttcgcagagaccaaagttcaactgaaacgaatcaaccggtttattgattaacaagcaattacagattacgggtgaggtaacgggtgccgatggggcgaggctcagaataagtgccatctgtgttaacagcaaagtccacatttgtagatttgtagtagttggaagtgtattgaatctctgggttccagcgtttgctgttttctttctgcagctcccattcaatttccacgctgacctgtccggtgctgtactgcgtgatgaacgacgccagcttagcttgactgaaggtagttggaggatccgcgggaacaggtgtattcttaatcaggatctgaggaggcgggtgtttcagtccaaagccccccatcagcggcgagggatgaaagtttccgtccgtgtgaggaatcttggcccagataggaccctgcaggtacacgtcccggttctgccagaccatgccaggtaaggctccttgactgttgacggcccctacaataggagcggcgttttgctgttgcaggttatcggccaccacgccgtactgttctgtggccactgggttggtggttttaatttcttcctcactggttagcataacgctgctatagtccacgttgccttttccagctccctgtttcccaaacattaagactccgctggacggaaaaaatcgctcttcgtcgtccttgtgggttgccatagcgacaccgggatttaccagagagtctctgccattcagatgatacttggtggcaccggtccaggcaaagttgctgttgttattttgcgacagtgtcgtggagacgcgttgctgccggtagcagggcccgggtagccagtttttggcctgagccgacatgttattaggcccggcctgagaaaatagcaactgctgagttcctgcggtacctcccgtggactgagtccgagacaggtagtacaggtactggtcgatgagggggttcatcagccggtccaggctttggctgtgcgcgtagctgctgtgaaaaggcacgtcctcaaactggtagctgaactcaaagttgttgcccgttctcagcatttgagaaggaaagtactccaggcagtagaaggaggaacggcccacggcctgactgccattgttcagagtcaggtacccgtactgaggaatcatgaagacgtccgccgggaacggaggcaggcagccctggcgcgcagagccgaggacgtacgggagctggtattccgagtccgtaaagacctgaatcgtgctggtaaggttattggcgatggtcttggtgccttcattctgcgtgacctccttgacctggatgttgaagagcttgaagttgagtctcttgggccggaatccccagttgttgttgatgagtcgctgccagtcacgtggtgagaagtggcagtggaatctgttaaagtcaaaatacccccagggggtgctgtagccgaagtaggtgttgtcgttggtgcttcctcccgaagtcccgttggagatttgcttgtagaggtggttgttgtaggtggggagggcccaggttcgggtgctggtggtgatgactctgtcgcccagccatgtggaatcgcaatgccaatttcctgaggaactacccactccgtcggcgccttcgttattgtctgccattggagcgccaccgcctgcagccattgtaccagatcccagaccagaggggcctgcggggggttctccgattggttgagggtcgggcactgactctgagtcgccagtctgcccaaagttgagtctctttttcgcgggctgctggcctttcttgccgatgcccgtagtggagtctggagaacgctggggtgatggctctaccggtctcttctttccaggagccgtcttagcgccttcctcaaccagaccgagaggttcgagaacccgcttcttggcctggaagactgctcgtccgaggttgcccccaaaagacgtatcttcttgcagacgctcctgaaactcggcgtcggcgtggttataccgcaggtacggattgtcacccgctttgagctgctggtcgtaggccttgtcgtgctcgagggccgctgcgtccgccgcgttgacgggctcccccttgtcgagtccgttgaagggtccgaggtacttgtagccaggaagcaccagaccccggccgtcgtcctgcttttgctggttggctttgggcttcggggctccaggtttcagcgcccaccactcgcgaatgccctcagagaggttgtcctcgagccaatctggaagataaccatcggcagccatacctgatctaaatcatttattgttcaaagatgcagtcatccaaatccacattgaccagatcgcaggcagtgcaagcgtctggcacctttcccatgatatgatgaatgtagcacagtttctgatacgcctttttgacgacagaaacgggttgagattctgacacgggaaagcactctaaacagtctttctgtccgtgagtgaagcagatatttgaattctgattcattctctcgcattgtctgcagggaaacagcatcagattcatgcccacgtgacgagaacatttgttttggtacctgtccgcgtagttgatcgaagcttccgcgtctgacgtcgatggctgcgcaactgactcgcgcacccgtttgggctcacttatatctgcgtcactgggggcgggtcttttcttggctccaccctttttgacgtagaattcatgctccacctcaaccacgtgatcctttgcccaccggaaaaagtctttgacttcctgcttggtgaccttcccaaagtcatgatccagacggcgggtgagttcaaatttgaacatccggtcttgcaacggctgctggtgttcgaaggtcgttgagttcccgtcaatcacggcgcacatgttggtgttggaggtgacgatcacgggagtcgggtctatctgggccgaggacttgcatttctggtccacgcgcaccttgcttcctccgagaatggctttggccgactccacgaccttggcggtcatcttcccctcctcccaccagatcaccatcttgtcgacacagtcgttgaagggaaagttctcattggtccagttgacgcagccgtagaagggcgaattc

SEQ ID NO: 149 - protein, 733 aa, Artificial Sequence
  source: /note="Description of Artificial Sequence: Synthetic polypeptide"
MAADGYLPDWLEDNLSEGIREWWDLKPGAPKLKANQQKQDDGRGLVLPGYKYLGPFHGLDKGEPVNAADAAALEHDKAYDQQLKAGDNPYLRYNHADAEFQERLQEDTSFGGNLGRAVFQAKKRVLEPLGLVEEGAKTAPGKKRPLESPQEPDSSSGIGKKGKQPAKKRLNFEEDTGAGDGPPEGSDTSAMSSDIEMRAAPGGNAVDAGQGSDGVGNASGDWHCDSTWSEGKVTTTSTRTWVLPTYNNHLYLRLGTTSNSNTYNGFSTPWGYFDFNRFHCHFSPRDWQRLINNNWGLRPKAMRVKIFNIQVKEVTTSNGETTVANNLTSTVQIFADSSYELPYVMDAGQEGSLPPFPNDVFMVPQYGYCGIVTGENQNQTDRNAFYCLEYFPSQMLRTGNNFEMAYNFEKVPFHSMYAHSQSLDRLMNPLLDQYLWHLQSTTSGETLNQGNAATTFGKIRSGDFAFYRKNWLPGPCVKQQRFSKTASQNYKIPASGGNALLKYDTHYTLNNRWSNIAPGPPMATAGPSDGDFSNAQLIFPGPSVTGNTTTSANNLLFTSEGEIAATNPRDTDMFGQIADNNQNATTAPITGNVTAMGVLPGMVWQNRDIYYQGPIWAKIPHADGHFHPSPLIGGFGLKHPPPQIFIKNTPVPANPATTFTAARVDSFITQYSTGQVAVQIEWEIEKERSKRRNPEVQFTSNYGNQSSMLWAPDTTGKYTEPRVIGSRYLTNHL

SEQ ID NO: 150 - protein, 735 aa, Artificial Sequence
  source: /note="Description of Artificial Sequence: Synthetic polypeptide"
MAADGYLPDWLEDTLSEGIRQWWKLKPGPPPPKPNQQHRDDSRGLVLPGYKYLGPFNGLDKGEPVNEADAAALEHDKAYDHQLKQGDNPYLKYNHADAEFQERLQEDTSFGGNLGRAVFQAKKRVLEPLGLVEEAVKTAPGKKRPIEQSPAEPDSSSGIGKSGQQPAKKRLNFGQTGDTESVPDPQPIGEPPAAPSGVGSNTMASGGGAPMADNNEGADGVGNSSGNWHCDSTWMGDRVITTSTRTWALPTYNNHLYKQISSESGATNDNHYFGYSTPWGYFDFNRFHCHFSPRDWQRLINNNWGFRPKKLNFKLFNIQVKEVTQNDGTTTIANNLTSTVQVFTDSEYQLPYVLGSAHQGCLPPFPADVFMIPQYGYLTLNNGSQAVGRSSFYCLEYFPSQMLRTGNNFTFSYTFEDVPFHSSYAHSQSLDRLMNPLIDQYLYYLSKTQGTSGTTQQSRLQFSQAGPSSMAQQAKNWLPGPSYRQQRMSKTANDNNNSEFAWTAATKYYLNGRNSLVNPGPPMASHKDDEEKYFPMHGNLIFGKQGTGTTNVDIESVLITDEEEIRTTNPVATEQYGQVATNHQSQNTTASYGSVDSQGILPGMVWQDRDVYLQGPIWAKIPHTDGHFHPSPLMGGFGLKHPPPQILIKNTPVPANPATTFTPGKFASFITQYSTGQVSVEIEWELQKENSKRWNPEIQYTSNYNKSVNVEFTVDANGVYSEPRPIGTRYLTRNL

SEQ ID NO: 151 - DNA, 3127 bp, Artificial Sequence
  source: /note="Description of Artificial Sequence: Synthetic polynucleotide"
gcggccgcgaattcgcccttcgcagagaccaaagttcaactgaaacgaatcaaccggtttattgattaacatgcaattacagattacgggtgaggtaacgagtgccaatagggcgaggctcagagtaaacaccctggctgtcaacggcaaagtccacaccagtctgcttttcaaagttggaggtgtactgaatctccgggtcccagcgcttgctgttttccttctgcagctcccactcgatttccacgctgacttgtccggtgctgtactgtgtgatgaacgaagcaaacttggcaggagtaaacacctccggaggattagcgggaacgggagtgttcttgatcaggatctgaggaggcggatgtttaagtccaaagccgcccatcaaaggagacgggtgaaagttgccatccgtgtgaggaatcttggcccagatgggaccctgcaggtacacgtcccggttctgccagaccatgccaggtaaggctccctggttgttgacaacttgtgtctgggctgcagtattagccgcttgtaagttgctgctgactatcccgtattcttccgtggctacaggattagtaggacgaatttcttcttcatttgtcattaacacattttccaatgtagttttgttagttgctccagtttttccaaaaatcaggactccgctggatgggaaaaagcggtcctcgtcgtccttgtgagttgccatggcgacgccgggattaaccaacgagtttctgccgttcaggtgatatttggtggcaccagtccaagcaaagttgctgttgttgttttgatccagcgttttggagaccctttgttgccggaagcagggtccaggtaaccaattcttggcttgttcggccatagttgaaggcccgccctggtaaaactgcagttcccgattgccagctgtgcctcctgggtcactctgtgttctggccaggtagtacaagtactggtcgatgaggggattcatcagccggtccaggctctggctgtgtgcgtagctgctgtggaaaggcacgtcctcgaagctgtagctgaactcaaagttgttgcccgttctcagcatctgagaggggaagtactccaggcagtagaaggaggaacgtcccacagactgactgccattgttgagagtcaggtagccgtactgaggaatcatgaagacgtccgccgggaacggaggcaggcagccctggtgcgcagagccgaggacgtacggcagctggtattccgagtccgagaatacctgaatcgtgctggtaaggttattagcgatggtcgtaacgccgtcattcgtcgtgacctccttgacctggatgttgaagagcttgaaccgcagcttcttgggccggaatccccagttgttgttgatgagtcgctgccagtcacgtggtgagaagtggcagtggaatctgttaaagtcaaaatacccccagggggtgctgtagccgaagtaggtgttgtcgttggtactacctgcagtttcactggagatttgctcgtagaggtggttgttgtaggtgggcagggcccaggttcgggtgctggtggtaatgactctgtcgcccagccatgtggaatcgcaatgccaatttcctgaggcattacccactccgtcggcaccttcgttattgtctgccattggtgcgccaccgcctgcagccactgtaccagatcccacactagagggcgctgctggaggttctccgagaggttgagggtcggggactgactctgagtcgccagtctgaccgaaattgagtctctttctggcgggctgctggcccttcttgccgatgcccgtggaggagtcgggggaacgctgaggtgacggctctaccggtctcttctttgcaggagccgtcttagcgccttcctcaaccagaccgagaggttcgagaacccgcttcttggcctggaagactgctcgcccgaggttgcccccaaatgacgtatcttcttgcagacgctcctgaaactcggcgtcggcgtggttataccgcaggtacgggttgtcacccgcattgagctgctggtcgtaggccttgtcgtgctcgagggccgctgcgtccgccgcgttgacgggctcccccttgtcgagtccgttgaagggtccgaggtacttgtagccaggaagcaccagaccccggccgttgtcctgcttttgctggttggctttgggtttcggggctccaggtttcaggtcccaccactcgcgaatgccctcagagaggttgtcctcgagccaatctggaagataaccatcggcagccatacctgatttaaatcatttattgttcaaagatgcagtcatccaaatccacattgaccagatcgcaggcagtgcaagcgtctggcacctttcccatgatatgatgaatgtagcacagtttctgatacgcctttttgacgacagaaacgggtttagattctgacacgggaaagcactctaaacagtctttctgtccgtgagtgaagcagatatttgaattctgattcattctctcgcattgtctgcagggaaacagcatcagattcatgcccacgtgacgagaacatttgttttggtacctgtctgcgtagttgatcgaagcttccgcgtctgacgtcgatggctgcgcaactgactcgcgcacccgtttgggctcacttatatctgcgtcactgggggcgggtcttttcttggctccaccctttttgacgtagaattcatgctccacctcaaccacgtaatcctttgcccaccggaaaaagtctttgacttcctgcttggtgaccttcccaaagtcatgatccagacggcgggtgagttcaaatttgaacatccggtcttgcaacggctgctggtgttcgaaggtcgttgagttcccgtcgatcacggcgcacatgttggtgttggagatgacgatcgcgggagtcgggtctatctgggccgaggacttgcatttctggtccacgcgcaccttgcttcctccgagaatggctttggccgactccacgaccttggcggtcatcttcccctcctcccaccagatcaccatcttgtcgacacagtcgttgaagggaaagttctcattggtccagttgacgcagccgtagaaagggcgaattc

SEQ ID NO: 152 - protein, 728 aa, Artificial Sequence
  source: /note="Description of Artificial Sequence: Synthetic polypeptide"
MAADGYLPDWLEDNLSEGIREWWDLKPGAPKPKANQQKQDDGRGLVLPGYKYLRPFNGLDKGEPVNEADAAALEHDKAYDKQLEQGDNPYLKYNHADAEFQERLQEDTSFGGNLGRAVFQAKKRVLEPLGLVEEVAKTAPGKKRPIESPDSSTGIGKKGQQPAKKKLNFGQTGDSESVPDPQPLGEPPAAPSGLGSGTMAAGGGAPMADNNEGADGVGNASGNWHCDSTWLGDRVITTSTRTWALPTYNNHLYKQISSQSGATNDNHFFSYSTPWGYFDFNRFHCHFSPRDWQRLINNNWGFRPRKLRFKLFNIQVKEVTTNDGVTTIANNLTSTIQVFSDSEYQLPYVLGSAHQGCLPPFPADVFMIPQYGYLTLNNGSQSVGRSSFYCLEYFPSQMLRTGNNFEFSYTFEEVPFHSSYVHSQSLDRLMNPLIDQYLYYLARTQSTTGSTRELQFHQAGPNTMAEQSKNWLPGPCYRQQRLSKNIDSNNNSNFAWTGATKYHLNGRNSLTNPGVAMATNKDDEDQFFPINGVLVFGKTGAANKTTLENVLMTSEEEIKTTNPVATEEYGVVSSNLQSSTAGPQTQTVNSQGALPGMVWQNRDVCLQGPIWAKIPHTDGNFHPSPLMGGFGLKHPPPQILIKNTPVPANPPEVFTPAKFASFITQYSTGQVSVEIEWELQKENSKRWNPEIQYTSNYAKSNNVEFAVNNEGVYTEPRPIGTRYLTRNL

SEQ ID NO: 153 - DNA, 3106 bp, Artificial Sequence
  source: /note="Description of Artificial Sequence: Synthetic polynucleotide"
gcggccgcgaattcgcccttcgcagagaccaaagttcaactgaaacgaatcaaccggtttattgattaacaagtaattacaggttacgggtgaggtaacgggtgccaatggggcgaggctcagtataaaccccttcgttgttgacagcaaattccacattattagacttggcataatttgaggtgtactgaatctctggattccagcgtttgctgttttctttctgcagttcccactcgatctccacgctgacctggccggtgctgtactgcgtgataaatgaggcaaacttggcaggagtaaacacctctggaggattagcaggtaccggggtgtttttgatgagaatttgaggaggcgggtgtttgagtccaaatccgcccatcaggggagacgggtgaaagttgccgtccgtgtgaggaattttggcccagatgggaccctgcaggcacacgtcccggttctgccagaccatgccgggcagagccccctggctgttgacagtctgtgtctggggtccggccgtagacgattgcaggttgctggagaccacaccgtattcttctgtagccacgggattggtggttttgatctcctcctcgctggtcattagcacgttttccagcgttgtcttgttggcagcccccgttttgccaaaaaccagcactccgttgatgggaaagaactggtcctcgtcgtccttgttggtggccatggctacgcccgggttggttaatgaatttctaccattcagatggtatttagtggccccggtccaggcaaagttactgttgttgttgctgtctatgttttttgacagtctctgctgccgataacagggtccgggcagccagttctttgattgctcggccatggtgttgggcccagcctgatggaactgcagctcccttgtggaccccgtagtgctctgggtccgggccaggtagtacaggtactggtcgatgaggggattcatcagccggtctaggctctggctgtgcacatagctgctgtggaaaggcacttcctcaaaggtgtagctgaattcaaagttattgcccgttctcagcatctgagaaggaaagtactccaggcagtagaaggaggaacgtcccacagactgactgccgttgtttagagtcagatatccgtactgaggaatcatgaacacgtccgcagggaacggagggaggcagccctggtgcgcagagccgaggacgtacggcagttggtactccgagtccgagaagacctgaatcgtgctggtaaggttattagcgatggtcgtaacgccgtcgttcgtcgtgacctccttgacctggatgttgaacaacttgaaccgcagctttctgggccggaatccccagttgttgttgatgagtcgctgccagtcacgtggtgagaagtggcagtggaatctgttgaagtcaaaatagccccagggggtgctgtagctgaagaagtggttgtcgttggtagccccgctctgacttgatatctgcttgtagaggtggttgttgtaggtgggcagggcccaggtgcgggtgctggtggtgatgactctgtcgcccagccatgtggaatcgcaatgccaatttccggaggcattacccactccgtcggcgccttcgttattgtctgccattggtgcgccaccgcctgcagccattgtaccagatcccagacctgagggcgcggcgggaggttctccgagaggttgggggtcgggcactgactctgagtcgccagtctgcccaaagttgagcttctttttagcgggctgctggcctttcttgccgatgcccgtggaggagtcgggggattctatgggtctcttctttccaggagccgtcttagcgacttcctcaaccagaccgagaggttcgagaacccgcttcttggcctggaagactgctcgcccgaggttgcccccaaaagacgtatcttcttgaagacgctcctgaaactcggcgtcggcgtggttgtacttgaggtacgggttgtccccctgctcgagctgcttgtcgtaggccttgtcgtgctcgagggccgcggcgtctgcctcgttgaccggctctcccttgtcgagtccgttgaagggtctgaggtacttgtagccaggaagcaccagaccccggccgtcgtcctgcttttgctggttggctttgggtttcggggctccaggtttcaagtcccaccactcgcgaatgccctcagagaggttgtcctcgagccaatctggaagataaccatcggcagccatacctggtttaagtcatttattgctcagaaacacagtcatccaggtccacgttgaccagatcgcaggccgagcaagcaatctcgggagcccgccccagcagatgatgaatggcacagagtttccgatacgtcctctttctgacgaccggttgagattctgacacgccggggaaacattctgaacagtctctggtcccgtgcgtgaagcaaatgttgaaattctgattcactctctcgcatgtcttgcagggaaacagcatctgaagcatgcccgcgtgacgagaacatttgttttggtacctgtcggcaaagtccaccggagctccttccgcgtctgacgtcgatggattcgcgactgaggggcaggcccgcttgggctcgcttttatccgcgtcatcgggggcgggtctcttgttggccccaccctttctgacgtagaacccatgcgccacctcggtcacgtgatcctgcgcccagcggaagaaccttttgacttcctgctttgtcaccttgccaaagttatgctccagacggcgggtgggttcaaatttgaacatccggtcctgcaacggctgctggtgctcgaaggtggcgctgttcccgtcaatcacggcgcacatgttggtgttggaggtgacggtcacgggggtggggtcgatctgggcggacgacttgcacttttggtccacgcgcaccttgctgccgccgagaatggccttggcggactccacgaccttggccgtcatcttgccctcctcccaccagatcaccatcttgtcggcgcaatcgttgaagggaaagttctcattggtccagttgacgcagccgtagaaagggcgaattc

SEQ ID NO: 154 - protein, 728 aa, Artificial Sequence
  source: /note="Description of Artificial Sequence: Synthetic polypeptide"
MAADGYLPDWLEDNLSEGIREWWDLKPGAPKPKANQQKQDDGRGLVLPGYKYLGPFNGLDKGEPVNEADAAALEHDKAYDKQLEQGDNPYLKYNHADAEFQERLQEDTSFGGNLGRAVFQAKKRVLEPLGLVEEGAKTASGKKRPIESPDSSTGIGKKGQQPAKKKLNFGQTGDSESVPDPQPLGEPPAAPSGLGSGTMAAGGGAPMADNNEGADGVGNASGNWHCDSTWLGDRVITTSTRTWALPTYNNHLYKQISSQSGATNDNHFFGYSTPWGYFDFNRFHCHFSPRDWQRLINNNWGFRPRKLRFKLFNIQVKEVTTNDGVTTIANNLTSTIQVFSDSEYQLPYVLGSAHQGCLPPFPADVFMIPQYGYLTLNNGSQSVGRSSFCCLEYFPSQMLRTGNNFEFSYTFEEVPFHSSYAHSQSLDRLMNPLIDQYLYYLARTQSTTGSTRELQFHQAGPNTVAEQSKNWLPGPCYRQQRLSKNIDSNNNSNFAWTGATKYHLNGRNSLTNPGVAMATNKDDEDQFLPINGVLVFGKTGAANKTTLENVLMTSEEEIKTTNPVATEEYGVVSSNLQSSTAGPRTQTVNSQGALPGMVWQNRDVYLQGPIWAEIPHTDGNFHPSPLMGGFGLKHPPPQILIKNTPVPANPPEVFTPAKFASFITQYSTGQVSVEIEWELQKENSKRWNPEIQYTSNYAKSNNVEFAVNNEGVYTEPRPIGTRYLTRNL

SEQ ID NO: 155 - DNA, 3102 bp, Artificial Sequence
  source: /note="Description of Artificial Sequence: Synthetic polynucleotide"
gcggccgcgaattcgcccttcgcagagaccaaagttcaactgaaacgaatcaaccggtttattgattaacaagtaattacaggttacgggtgaggtaacgggtgccaatggggcgaggctcagtataaaccccttcgttgttgacagcaaattccacattattagacttggcataatttgaggtgtactgaatctctggattccagcgtttgctgttttctttctgcagttcccactcgatctccacgctgacctggccggtgctgtactgcgtgataaatgaggcaaacttggcaggagtaaacacctctggaggattagcaggtaccggggtgtttttgatgagaatttgaggaggcgggtgtttgagtccaaatccgcccatcaggggagacgggtgaaagttgccgtccgtgtgaggaatttcggcccagatgggaccctgcaggtacacgtcccggttctgccagaccatgccgggcagagccccctggctgttgacagtctgtgtccggggtccggccgtagacgattgcaggttgctggagaccacaccgtattcttctgtagccacgggattggtggttttgatctcctcctcgctggtcattagcacgttttccagcgttgtcttgttggcagcccccgttttgccaaaaaccagcactccgttgatgggaaggaactggtcctcgtcgtccttgttggtggccatggctacgcccgggttggttaatgaatttctaccattcagatggtatttagtggccccggtccaggcaaagttactgttgttgttgctgtctatgttttttgacagtctctgctgccgataacagggtccgggcagccagttctttgattgctcggccacggtgttgggcccagcctgatggaactgcagctcccttgtggaccccgtagtgctctgggtccgggccaggtagtacaggtactggtcgatgaggggattcatcagccggtccaggctctggctgtgcgcatagctgctgtggaaaggcacttcctcaaaggtgtagctgaattcaaagttattgcccgttctcagcatctgagaaggaaagtactccaggcagcagaaggaggaacgtcccacagactgactgccgttgtttagagtcagatatccgtactgaggaatcatgaacacgtccgcagggaacggagggaggcagccctggtgcgcagagccgaggacgtacggcagttggtactccgagtccgagaagacctgaatcgtgctggtaaggttattagcgatggtcgtaacgccgtcgttcgtcgtgacctccttgacctggatgttgaacaacttgaaccgcagctttctgggccggaatccccagttgttgttgatgagtcgctgccagtcacgtggtgagaagtggcagtggaatctgttgaagtcaaaatagccccagggggtgctgtagccgaagaagtggttgtcgttggtagccccgctctgacttgatatctgcttgtagaggtggttgttgtaggtgggcagggcccaggtgcgggtgctggtggtgatgactctgtcgcccagccatgtggaatcgcaatgccaatttccggaggcattacccactccgtcggcgccttcgttattgtctgccattggtgcgccaccgcctgcagccattgtaccagatcccagacctgagggcgcggcgggaggttctccgagaggttgggggtcgggcactgactctgagtcgccagtctgcccaaagttgagcttctttttagcgggctgctggcctttcttgccgatgcccgtggaggagtcgggggattctatgggtctcttctttccggaagccgtcttagcgccttcctcaaccagaccgagaggttcgagaacccgcttcttggcctggaagactgctcgcccgaggttgcccccaaaagacgtatcttcttgaagacgctcctgaaactcggcgtcggcgtggttgtacttgaggtacgggttgtccccctgctcgagctgcttgtcgtaggccttgtcgtgctcgagggccgcggcgtctgcctcgttgaccggctctcccttgtcgagtccgttgaagggtccgaggtacttgtagccaggaagcaccagaccccggccgtcgtcctgcttttgctggttggctttgggtttcggggctccaggtttcaagtcccaccactcgcgaatgccctcagagaggttgtcctcgagccaatctggaagataaccatcggcagccatacctggtttaagtcatttattgctcagaaacacagtcatccaggtccacgttgaccagatcgcaggccgagcaagcaatctcgggagcccgccccagcagatgatgaatggcacagagtttccgatacgtcctctttctgacgaccggttgagattctgacacgccggggaaacattctgaacagtctctggtcccgtgcgtgaagcaaatgttgaaattctgattcattctctcgcatgtcttgcagggaaacagcatctgaagcatgcccgcgtgacgagaacatttgttttggtacctgtcggcaaagtccaccggagctccttccgcgtctgacgtcgatggatccgcgactgaggggcaagcccgcttgggctcgcttttatccgcgtcatcgggggcgggtctcttgttggctccaccctttctgacgtagaactcatgcgccacctcggtcacgtgatcctgcgcccagcggaagaactctttgacttcctgctttgtcaccttgccaaagtcatgctccagacggcgggtgagttcaaatttgaacatccggtcttgtaacggctgctggtgctcgaaggtggtgctgttcccgtcaatcacggcgcacatgttggtgttggaagtgacgatcacgggggtgggatcgatctgggcggacgacttgcacttttggtccacgcgcaccttgctgccgccgagaatggccttggcggactccacgaccttggccgtcatcttgccctcctcccaccagatcaccatcttgtcgacgcaatcgttgaagggaaagttctcattggtccagttgacgcagccgaagggcgaattc

SEQ ID NO: 156 - protein, 728 aa, Artificial Sequence
  source: /note="Description of Artificial Sequence: Synthetic polypeptide"
MAADGYLPDWLEDNLSEGIREWWDLKPGAPKPKANQQKQDDGRGLVLPGYRYLGPFNGLDKGEPVNEADAAALEHDKAYDKQLEQGDNPYLKYNHADAEFQERLQEDTSFGGNLGRAVFQAKKRVLEPLGLVEEGAKTAPGKKRPIESPDSSTGIGKNGQPPAKKKLNFGQTGDSESVPDPQPLGEPPAAPSGLGSGTMAAGGGAPMADNNEGADGVGNASGNWHCDSTWLGDRVITTSTRTWALPTYNNHLYKQISSQSGATNDNHFFGYSTPWGYFDFNRFHCHFSPRDWQRLINNNWGFRPRKLRFKLFNIQVKEVTTNDGVTTIANNLTSTIQVFSDSEYQLPYVLGSAHQGCLPPFPADVFMIPQYGYLTLNNGSQSVGRSSFYCLEYFPSQMLRTGNNFEFSYTFEEVPFHSSYAHSQSLDRLMNPLIDQYLYYLARTQSTTGSTRELQFHQAGPNTMAEQSKNWLPGPCYRQQRLSKNIDSNNNSNFAWTGATKYHLNGRNSLTNPGVAMATNKDDEDQFFPINGVLVFGKTGAANKTTLENVLMTSEEEIKTTNPVATEEYGVVSSNLQSSTAGPQTQTVNSQGALPGMVWQNRDVYLQGPIWAKIPHTDGNFHPSPLMGGFGLKHPPPQILIKNTPVPANPPEVFTPAKFASFITQYSTGQVSVEIEWELQKENSKRWNPEIQYTSNYAKSNNVEFAVNNEGVYTEPRPIGTRYLTRNL

SEQ ID NO: 157 - protein, 728 aa, Artificial Sequence
  source: /note="Description of Artificial Sequence: Synthetic polypeptide"
MAADGYLPDWLEGNLSEGIREWWDLKPGAPKPKANQQKQDDGRGLVLPGYRYLGPFNGLDKGEPVNEADAAALEHDKAYDKQLEQGDNPYLKYNHADAEFQERLQEDTSFGGNLGRAVFQAKKRVLEPLGLVEEGAKTAPGKKRPIESPDSSTGIGKNGQPPAKKKLNFGQTGDSESVPDPQPLGEPPAAPSGLGSGTMAAGGGAPMADNNEGADGVGNASGNWHCDSTWLGDRVITTSTRTWALPTYNNHLYKQISSQSGATNDNHFFGYSTPWGYFDFNRFHCHFSPRDWQRLINNNWGFRPRKLRFKLFNIQVKEVTTNDGVTTIANNLTSTIQVFSDSEYQLPYVLGSAHQGCLPPFPADVFMIPQYGYLTLNNGSQSVGRSSFYCLEYFPSQMLRTGDNFEFSYTFEEVPFHSSYAHSQSLDRLMNPLIDQYLYYLARTQSTTGSTRELQFHQAGPNTMAEQSKNWLPGPCYRQQRLSKNIDSNNNSNFAWTGATKYHLNGRNSLTNPGVAMATNKDDEDQFFPINGVLVFGKTGAANKTTLENVLMTSEEEIKTTNPVATEEYGVVSSNLQSSTAGPQTQTVNSQGALPGMVWQNRDVYLQGPIWAKIPHTDGNFHPSPLMGGFGLKHPPPQILIKNTPVPANPPEVFTPAKFASFITQYSTGQVSVEIEWELQKENSKRWNPEIQYTSNYAKSNNVEFAVNNEGVYTEPRPIGTRYLTRNL

SEQ ID NO: 158 - DNA, 3106 bp, Artificial Sequence
  source: /note="Description of Artificial Sequence: Synthetic polynucleotide"
gcggccgcgaattcgcccttcgcagagaccaaagttcaactgaaacgaatcagccggtttattgattaacaagtaattacaggttacgggtgaggtaacgggtgccaatggggcgaggctcagtataaaccccttcgttgttgacagcaaattccacattattagacttggcataatttgaggtgtactgaatctctggattccagcgtttgctgttttctttctgcagttcccactcgatctccacgctgacctggccggtgctgtactgcgtgataaatgaggcaaacttggcaggagtaaacacctctggaggattagcaggtaccggggtgtttttgatgagaatttgaggaggcgggtgtttgagtccaaatccgcccatcaggggagacgggtgaaagttgccgtccgtgtgaggaattttggcccagatgggaccctgcaggtacacgtcccggttctgccagaccatgccgggcagagccccctggctgttgacagtctgtgtctggggtccggccgtagacgattgcaggttgctggagaccacaccgtattcttctgtagccacgggattggtggttttgatctcctcctcgctggtcattagcacgttttccagcgttgtcttgttggcagcccccgttttgccaaaaaccagcactccgttgatgggaaagaactggtcctcgtcgtccttgttggtggccatggctacgcccgggttggttaatgaatttctaccattcagatggtatttagtggccccggtccaggcaaagttactgttgttgttgctgtctatgttttttgacagtctctgctgccgataacagggtccgggcagccagttctttgattgctcggccatggtgttgggcccagcctgatggaactgcagctcccttgtggaccccgtagtgctctgggtccgggccaggtagtacaggtactggtcgatgaggggattcatcagccggtccaggctctggctgtgcgcatagctgctgtggaaaggcacttcctcaaaggtgtagctgaattcaaagttatcgcccgttctcagcatctgagaaggaaagtactccaggcagtagaaggaggaacgtcccacagactgactgccgttgtttagagtcagatatccgtactgaggaatcatgaacacgtccgcagggaacggagggaggcagccctggtgcgcagagccgaggacgtacggcagttggtactccgagtccgagaagacctgaatcgtgctggtaaggttattagcgatggtcgtaacgccgtcgttcgtcgtgacctccttgacctggatgttgaacaacttgaaccgcagctttctgggccggaatccccagttgttgttgatgagtcgctgccagtcacgtggtgagaagtggcagtggaatctgttgaagtcaaaatagccccagggggtgctgtagccgaagaagtggttgtcgttggtagccccgctctgacttgatatctgcttgtagaggtggttgttgtaggtgggcagggcccaggtgcgggtgctggtggtgatgactctgtcgcccagccatgtggaatcgcaatgccaatttccggaggcattacccactccgtcggcgccttcgttattgtctgccattggtgcgccaccgcctgcagccattgtaccagatcccagacctgagggcgcggcgggaggttctccgagaggttgggggtcgggcactgactctgagtcgccagtctgcccaaagttgagcttctttttagcgggcggctggccgttcttgccgatgcccgtggaggagtcgggggattctatgggtctcttctttccaggagccgtcttagcgccttcctcaaccagaccgagaggttcgagaacccgcttcttggcctggaagactgctcgcccgaggttgcccccaaaagacgtatcttcttgaagacgctcctgaaactcggcgtcggcgtggttgtacttgaggtacgggttgtccccctgctcgagctgcttgtcgtaggccttgtcgtgctcgagggccgcggcgtctgcctcgttgaccggctctcccttgtcgagtccgttgaagggtccgaggtacctgtagccaggaagcaccagaccccggccgtcgtcctgcttttgctggttggctttgggtttcggggctccaggtttcaagtcccaccactcgcgaatgccctcagagaggttgccctcgagccaatctggaagataaccatcggcagccatacctggtttaagtcatttattgctcagaaacacagtcatccaggtccacgttggccagatcgcaggccgagcaagcaatctcgggagcccgccccagcagatgatgaatggcacagagtttccgatacgtcctctttctgacgaccggttgagattctgacacgccggggaaacattctgaacagtctctggtcccgtgcgtgaagcaaatgttgaaattctgattcattctctcgcatgtcttgcaggggaacagcatctgaagcatgcccgcgtgacgagaacatttgttttggtacctgtcggcaaagtccaccggagctccttccgcgtctgacgtcgatggatccgcgactgaggggcaggcccgcttgggctcgcttttatccgcgtcatcgggggcgggtctcttgttggctccaccctttctgacgtagaactcatacgccacctcggtcacgtgatcctgcgcccagcggaagaactctttgacttcctgctttgtcaccttgccaaagtcatgctccagacggcgggtgagttcaaatttgaacatccggtcttgtaacggctgctggtgctcgaaggtggtgctgttcccgtcaatcacggcgcacatgttggtgttggaagtgacgatcacgggggtgggatcgatctgggcggacgacttgcacttttggtccacgcgcaccttgctgccgccgagaatggccttggcggactccacgaccttggccgtcatcctgccctcctcccaccagatcaccatcttgtcgacgcaatcgttgaagggaaagttctcattggtccagttgacgcagccgtagaaagggcgaattc

SEQ ID NO: 159 - protein, 728 aa, Artificial Sequence
  source: /note="Description of Artificial Sequence: Synthetic polypeptide"
MAADGYLPDWLEDNLSEGIREWWDLKPGAPKPKANQQKQDDGRGLVLPGYKYLGPFNGLDKGEPVNEADAAALEHDKAYDKQLEQGDNPYLKYNHADAEFQERLQEDTSFGGNLGRAVFQAKKRVLEPLGLVEEGAKTAPGKKRPIESPDSSTGIGKKGQQPAKKKLNFGQTGDSESVPDPQPLGEPPAAPSGLGSGTMAAGGGAPMADNNEGADGVGNASGNWHCDSTWLGDRVITTSTRTWALPTYNNHLYKQISSQSGATNDNHFFGYSTPWGYFDFNRFHCHFSPRDWQRLINNNWGFRPRKLRFKLFNIQVKEVTTNDGVTTIANNLTSTIQVFSDSEYQLPYVLGSAHQGCLPPFPADVFMIPQYGYLTLNNGSQSMGRSSFYCLEYFPSQMLRTGNNFEFSYTFEEVPFHSSYAHSQSLDRLMNPLIDQYLYYLARTQSTTGSTRELQFHQAGPNTMAEQSKNWLPGPCYRQQRLSKNIDSNNNSNFAWTGATKYHLNGRNSLTNPGVAMATNKDDEGQFFPINGVLVFGKTGAANKTTLENVLMTSEEEIKTTNPVATEEYGVVSSNLQSSTAGPQTQTVNSQGALPGMVWQNRDVYLQGPIWAKIPHTDGNFHPSPLMGGFGLKHPPPQILIKNTPVPANPPGVFTPALFASFITQYSTGQVSVEIEWELQKENSKRWNPEIQYTSNYAKSNNVEFAVNNEGVYTEPRPIGTRYLTRNL

SEQ ID NO: 160 - DNA, 3098 bp, Artificial Sequence
  source: /note="Description of Artificial Sequence: Synthetic polynucleotide"
gaattcgcccttcgcagagaccaaagttcaactgaaacgaatcaaccggtttattgattaacaagtaattacaggttacgggtgaggtaacgggtgccaatggggcgaggctcagtataaaccccttcgttgttgacagcaaattccacattattagacttggcataatttgaggtgtactgaatctctggattccagcgtttgctgttttctttctgcagttcccactcgatctccacgctgacctggccggtgctgtactgcgtgataaatgaggcaaactaggcaggagtaaacacccctggaggattagcaggtaccggggtgtttttgatgagaatttgaggaggcgggtgtttgagtccaaatccgcccatcaggggagacgggtgaaagttgccgtccgtgtgaggaattttggcccagatgggaccctgcaggtacacgtcccggttctgccagaccatgccgggcagagccccctggctgttgacagtctgtgtctggggtccggccgtagacgattgcaggttgctggagaccacaccgtattcttctgtagccacgggattggtggttttgatctcctcctcgctggtcattagcacgttttccagcgttgtcttgttggcagcccccgttttgccaaaaaccagcactccgttgatgggaaagaactggccctcgtcgtccttgttggtggccatggctacgcccgggttggttaatgaatttctaccattcagatggtatttagtggccccggtccaggcaaagttactgttgttgttgctgtctatgttttttgacagtctctgctgccgataacagggtccgggcagccagttctttgattgctcggccatggtgttgggcccagcctgatggaactgcagctcccttgtggaccccgtagtgctctgggtccgggccaggtagtacaggtactggtcgatgaggggattcatcagccggtccaggctctggctgtgcgcatagctgctgtggaaaggcacttcctcaaaggtgtagctgaattcaaagttattgcccgttctcagcatctgagaaggaaagtactccaggcagtagaaggaggaacgtcccatagactgactgccgttgtttagagtcagatatccgtactgaggaatcatgaacacgtccgcagggaacggagggaggcagccctggtgcgcagagccgaggacgtacggcagttggtactccgagtccgagaagacctgaatcgtgctggtaaggttattagcgatggtcgtaacgccgtcgttcgtcgtgacctccttgacctggatgttgaacaacttgaaccgcagctttctgggccggaatccccagttgttgttgatgagtcgctgccagtcacgtggtgagaagtggcagtggaatctgttgaagtcaaaatagccccagggggtgctgtagccgaagaagtggttgtcgttggtagccccgctctgacttgatatctgcttgtagaggtggttgttgtaggtgggcagggcccaggtgcgggtgctggtggtgatgactctgtcgcccagccatgtggaatcgcaatgccaatttccggaggcattacccactccgtcggcgccttcgttattgtctgccattggtgcgccaccgcctgcagccattgtaccagatcccagacctgagggcgcggcgggaggttctccgagaggttgggggtcgggcactgactctgagtcgccagtctgcccaaagttgagcttctttttagcgggctgctggcctttcttgccgatgcccgtggaggagtcgggggattctatgggtctcttctttccaggagccgtcttagcgccttcctcaaccagaccgagaggttcgagaacccgcttcttggcctggaagactgctcgcccgaggttgcccccaaaagacgtatcttcttgaagacgctcctgaaactcagcgtcggcgtggttgtacttgaggtacgggttgtccccctgctcgagctgcttgtcgtaggccttgtcgtgctcgagggccgcggcgtctgcctcgttgaccggctctcccttgtcgagtccgttgaagggtccgaggtacttgtagccaggaagcaccagaccccggccgtcgtcctgcttttgctggttggctttgggtttcggggctccaggtttcaagtcccaccactcgcgaatgccctcagagaggttgtcctcgagccaatctggaagataaccatcggcagccatacctggtttaagtcatttattgctcagaaacacagtcatccaggtccacgttgaccagatcgcaggccgagcaagcaatctcgggagcccgccccagcagatgatgaatggcacagagtttccgatacgtcctctttctgacgaccggttgagattctgacacgccggggaaacattctgaacagtctctggtcccgtgcgtgaagcaaatgttgaaattctgattcattctctcgcatgtcttgcagggaaacagcatctgaagcatgcccgcgtgacgagaacatttgttttggtacctgtcggcaaagtccaccggagctccttccgcgtctgacgtcgatggatccgcgactgaggggcaggcccgcttgggctcgcttttatccgcgtcatcgggggcgggcctcttgttggctccaccctttctgacgtagaactcatgcgccacctcggtcacgtgatcctgcgcccagcggaagaactctttgacttcctgctttgtcaccttgccaaagtcctgctccagacggcgggtgagttcaaatttgaacatccggtcttgtaacggctgctggtgctcgaaggtggtgctgttcccgtcaatcacggcgcacatgttggtgttggaagtgacgatcacgggggtgggatcgatctgggcggacgacttgcacttttggtccacgcgcaccttgctgccgccgagaatggccttggcggactccacgaccttggccgtcatcttgccctcctcccaccagatcaccatcttgtcgacgcaatcgttgaagggaaagttctcattggtccagttgacgcagccgtagaaagggcgaattc

SEQ ID NO: 161 - DNA, 2187 bp, Artificial Sequence
  source: /note="Description of Artificial Sequence: Synthetic polynucleotide"
atggctgccgatggttatcttccagattggctcgagggcaacctctctgagggcattcgcgagtggtgggacttgaaacctggagccccgaaacccaaagccaaccagcaaaagcaggacgacggccggggtctggtgcttcctggctacaggtacctcggacccttcaacggactcgacaagggagagccggtcaacgaggcagacgccgcggccctcgagcacgacaaggcctacgacaagcagctcgagcagggggacaacccgtacctcaagtacaaccacgccgacgccgagtttcaggagcgtcttcaagaagatacgtcttttgggggcaacctcgggcgagcagtcttccaggccaagaagcgggttctcgaacctctcggtctggttgaggaaggcgctaagacggctcctggaaagaagagacccatagaatcccccgactcctccacgggcatcggcaagaacggccagccgcccgctaaaaagaagctcaactttgggcagactggcgactcagagtcagtgcccgacccccaacctctcggagaacctcccgccgcgccctcaggtctgggatctggtacaatggctgcaggcggtggcgcaccaatggcagacaataacgaaggcgccgacggagtgggtaatgcctccggaaattggcattgcgattccacatggctgggcgacagagtcatcaccaccagcacccgcacctgggccctgcccacctacaacaaccacctctacaagcagatatcaagtcagagcggggctaccaacgacaaccacttcttcggctacagcaccccctggggctattttgacttcaacagattccactgccacttctcaccacgtgactggcagcgactcatcaacaacaactggggattccggcccagaaagctgcggttcaagttgttcaacatccaggtcaaggaggtcacgacgaacgacggcgttacgaccatcgctaataaccttaccagcacgattcaggtcttctcggactcggagtaccaactgccgtacgtcctcggctctgcgcaccagggctgcctccctccgttccctgcggacgtgttcatgattcctcagtacggatatctgactctaaacaacggcagtcagtctgtgggacgttcctccttctactgcctggagtactttccttctcagatgctgagaacgggcgataactttgaattcagctacacctttgaggaagtgcctttccacagcagctatgcgcacagccagagcctggaccggctgatgaatcccctcatcgaccagtacctgtactacctggcccggacccagagcactacggggtccacaagggagctgcagttccatcaggctgggcccaacaccatggccgagcaatcaaagaactggctgcccggaccctgttatcggcagcagagactgtcaaaaaacatagacagcaacaacaacagtaactttgcctggaccggggccactaaataccatctgaatggtagaaattcattaaccaacccgggcgtagccatggccaccaacaaggacgacgaggaccagttctttcccatcaacggagtgctggtttttggcaaaacgggggctgccaacaagacaacgctggaaaacgtgctaatgaccagcgaggaggagatcaaaaccaccaatcccgtggctacagaagaatacggtgtggtctccagcaacctgcaatcgtctacggccggaccccagacacagactgtcaacagccagggggctctgcccggcatggtctggcagaaccgggacgtgtacctgcagggtcccatctgggccaaaattcctcacacggacggcaactttcacccgtctcccctgatgggcggatttggactcaaacacccgcctcctcaaattctcatcaaaaacaccccggtacctgctaatcctccagaggtgtttactcctgccaagtttgcctcatttatcacgcagtacagcaccggccaggtcagcgtggagatcgagtgggaactgcagaaagaaaacagcaaacgctggaatccagagattcagtacacctcaaattatgccaagtctaataatgtggaatttgctgtcaacaacgaaggggtttatactgagcctcgccccattggcacccgttacctcacccgtaacctgtaa

SEQ ID NO: 162 - protein, 728 aa, Artificial Sequence; identical to SEQ ID NO: 157
  source: /note="Description of Artificial Sequence: Synthetic polypeptide"

SEQ ID NO: 163 - protein, 728 aa, Artificial Sequence
  source: /note="Description of Artificial Sequence: Synthetic polypeptide"
MAADGYLPDWLEDNLSEGIREWWDLKPGAPKPKANQQKQDDGRGLVLPGYRYLGPFNGLDKGEPVNEADAAALEHDKAYDKQLEQGDNPYLKYNHADAEFQERLQEDTSFGGNLGRAVFQAKKRVLEPLGLVEEGAKTAPGKKRPIESPDSSTGIGKNGQPPAKKKLNFGQTGDSESVPDPQPLGEPPAAPSGLGSGTMAAGGGAPMADNNEGADGVGNASGNWHCDSTWLGDRVITTSTRTWALPTYNNHLYKQISSQSGATNDNHFFGYSTPWGYFDFNRFHCHFSPRDWQRLINNNWGFRPRKLRFKLFNIQVKEVTTNDGVTTIANNLTSTIQVFSDSEYQLPYVLGSAHQGCLPPFPADVFMIPQYGYLTLNNGSQSVGRSSFYCLEYFPSQMLRTGDNFEFSYTFEEVPFHSSYAHSQSLDRLMNPLIDQYLYYLARTQSTTGSTRELQFHQAGPNTMAEQSKNWLPGPCYRQQRLSKNIDSNNNSNFAWTGATKYHLNGRNSLTNPGVAMATNKDDEDQFFPINGVLVFGKTGAANKTTLENVLMTSEEEIKTTNPVATEEYGVVSSNLQSSTAGPQTQTVNSQGALPGMVWQNRDVYLQGPIWAKIPHTDGNFHPSPLMGGFGLKHPPPQILIKNTPVPANPPEVFTPAKFASFITQYSTGQVSVEIEWELQKENSKRWNPEIQYTSNYAKSNNVEFAVNNEGVYTEPRPIGTRYLTRNL

SEQ ID NO: 164 - protein, 728 aa, Artificial Sequence; identical to SEQ ID NO: 156
  source: /note="Description of Artificial Sequence: Synthetic polypeptide"

SEQ ID NO: 165 - protein, 728 aa, Artificial Sequence
  source: /note="Description of Artificial Sequence: Synthetic polypeptide"
MAADGYLPDWLEDNLSEGIREWWDLKPGAPKPKANQQKQDDGRGLVLPGYKYLGPFNGLDKGEPVNEADAAALEHDKAYDKQLEQGDNPYLKYNHADAEFQERLQEDTSFGGNLGRAVFQAKKRVLEPLGLVEEGAKTAPGKKRPIESPDSSTGIGKNGQPPAKKKLNFGQTGDSESVPDPQPLGEPPAAPSGLGSGTMAAGGGAPMADNNEGADGVGNASGNWHCDSTWLGDRVITTSTRTWALPTYNNHLYKQISSQSGATNDNHFFGYSTPWGYFDFNRFHCHFSPRDWQRLINNNWGFRPRKLRFKLFNIQVKEVTTNDGVTTIANNLTSTIQVFSDSEYQLPYVLGSAHQGCLPPFPADVFMIPQYGYLTLNNGSQSVGRSSFYCLEYFPSQMLRTGNNFEFSYTFEEVPFHSSYAHSQSLDRLMNPLIDQYLYYLARTQSTTGSTRELQFHQAGPNTMAEQSKNWLPGPCYRQQRLSKNIDSNNNSNFAWTGATKYHLNGRNSLTNPGVAMATNKDDEDQFFPINGVLVFGKTGAANKTTLENVLMTSEEEIKTTNPVATEEYGVVSSNLQSSTAGPQTQTVNSQGALPGMVWQNRDVYLQGPIWAKIPHTDGNFHPSPLMGGFGLKHPPPQILIKNTPVPANPPEVFTPAKFASFITQYSTGQVSVEIEWELQKENSKRWNPEIQYTSNYAKSNNVEFAVNNEGVYTEPRPIGTRYLTRNL

SEQ ID NO: 166 - protein, 728 aa, Artificial Sequence
  source: /note="Description of Artificial Sequence: Synthetic polypeptide"
MAADGYLPDWLEDNLSEGIREWWDLKPGAPKPKANQQKQDDGRGLVLPGYKYLGPFNGLDKGEPVNEADAAALEHDKAYDKQLEQGDNPYLKYNHADAEFQERLQEDTSFGGNLGRAVFQAKKRVLEPLGLVEEGAKTAPGKKRPIESPDSSTGIGKKGQQPAKKKLNFGQTGDSESVPDPQPLGEPPAAPSGLGSGTMAAGGGAPMADNNEGADGVGNASGNWHCDSTWLGDRVITTSTRTWALPTYNNHLYKQISSQSGATNDNHFFGYSTPWGYFDFNRFHCHFSPRDWQRLINNNWGFRPRKLRFKLFNIQVKEVTTNDGVTTIANNLTSTIQVFSDSEYQLPYVLGSAHQGCLPPFPADVFMIPQYGYLTLNNGSQSVGRSSFYCLEYFPSQMLRTGNNFEFSYTFEEVPFHSSYAHSQSLDRLMNPLIDQYLYYLARTQSTTGSTRELQFHQAGPNTMAEQSKNWLPGPCYRQQRLSKNIDSNNNSNFAWTGATKYHLNGRNSLTNPGVAMATNKDDEDQFFPINGVLVFGKTGAANKTTLENVLMTSEEEIKTTNPVATEEYGVVSSNLQSSTAGPQTQTVNSQGALPGMVWQNRDVYLQGPIWAKIPHTDGNFHPSPLMGGFGLKHPPPQILIKNTPVPANPPEVFTPAKFASFITQYSTGQVSVEIEWELQKENSKRWNPEIQYTSNYAKSNNVEFAVNNEGVYTEPRPIGTRYLTRNL

SEQ ID NO: 167 - DNA, 2215 bp, Artificial Sequence
  source: /note="Description of Artificial Sequence: Synthetic polynucleotide"
atggctgccgatggttatcttccagattggctcgaggacactctctctgaaggaataagacagtggtggaagctcaaacctggcccaccaccaccaaagcccgcagagcggcataaggacgacagcaggggtcttgtgcttcctgggtacaagtacctcggacccttcaacggactcgacaagggagagccggtcaacgaggcagacgccgcggccctcgagcacgacaaagcctacgaccggcagctcgacagcggagacaacccgtacctcaagtacaaccacgccgacgccgagttccaggagcggctcaaagaagatacgtcttttgggggcaacctcgggcgagcagtcttccaggccaaaaagaggcttcttgaacctcttggtctggttgaggaagcggctaagacggctcctggaaagaagaggcctgtagagcactctcctgtggagccagactcctcctcgggaaccggaaaggcgggccagcagcctgcaagaaaaagattgaattttggtcagactggagacgcagactcagtcccagaccctcaaccaatcggagaacctcccgcagccccctcaggtgtgggatctcttacaatggctgcaggcggtggcgcaccaatggcagacaataacgagggcgccgacggagtgggtaattcctcgggaaattggcattgcgattccacatggatgggcgacagagtcatcaccaccagcacccgaacctgggccctgcccacctacaacaaccacctctacaagcaaatctccaacagcacatctggaggatcttcaaatgacaacgcctacttcggctacagcaccccctgggggtattttgactttaacagattccactgccacttttcaccacgtgactggcagcgactcatcaacaacaactggggattccggcccaagagactcagcttcaagctcttcaacatccaggtcaaggaggtcacgcagaatgaaggcaccaagaccatcgccaataacctcaccagcaccatccaggtgtttacggactcggagtaccagctgccgtacgttctcggctctgcccaccagggctgcctgcctccgttcccggcggacgtgttcatgattccccagtacggctacctaacactcaacaacggtagtcaggccgtgggacgctcctccttctactgcctggaatactttccttcgcagatgctgagaaccggcaacaacttccagtttacttacaccttcgaggacgtgcctttccacagcagctacgcccacagccagagcttggaccggctgatgaatcctctgattgaccagtacctgtactacttgtctcggactcaaacaacaggaggcacgacaaatacgcagactctgggcttcagccaaggtgggcctaatacaatggccaatcaggcaaagaactggctgccaggaccctgttaccgccagcagcgagtatcaaagacatctgcggataacaacaacagtgaatactcgtggactggagctaccaagtaccacctcaatggcagagactctctggtgaatccgggcccggccatggcaagccacaaggacgatgaagaaaagtttttttcctcagagcggggttctcatctttgggaagcaaggctcagagaaaacaaatgtggacattgaaaaggtcatgattacagacgaagaggaaatcaggacaaccaatcccgtggctacggagcagtatggttctgtatctaccaacctccagagaggcaacagacaagcagctaccgcagatgtcaacacacaaggcgttcttccaggcatggtctggcaggacagagatgtgtaccttcaggggcccatctgggcaaagattccacacacggacggacattttcacccctctcccctcatgggtggattcggacttaaacaccctccgcctcagatcctgatcaagaacacgcctgtacctgcggatcctccgaccaccttcaaccagtcaaagctgaactctttcatcacccagtattctactggccaagtcagcgtggagatcgagtgggagctgcagaaggaaaacagcaagcgctggaaccccgagatccagtacacctccaactactacaaatctacaagtgtggactttgctgttaatacagaaggcgtgtactctgaaccccgccccattggcacccgttacctcacccgtaatctgtaa

SEQ ID NO: 168 - protein, 737 aa, Artificial Sequence
  source: /note="Description of Artificial Sequence: Synthetic polypeptide"
MAADGYLPDWLEDTLSEGIRQWWKLKPGPPPPKPAERHKDDSRGLVLPGYKYLGPFNGLDKGEPVNEADAAALEHDKAYDRQLDSGDNPYLKYNHADAEFQERLKEDTSFGGNLGRAVFQAKKRLLEPLGLVEEAAKTAPGKKRPVEHSPVEPDSSSGTGKAGQQPARKRLNFGQTGDADSVPDPQPIGEPPAAPSGVGSLTMAAGGGAPMADNNEGADGVGNSSGNWHCDSTWMGDRVITTSTRTWALPTYNNHLYKQISNSTSGGSSNDNAYFGYSTPWGYFDFNRFHCHFSPRDWQRLINNNWGFRPKRLSFKLFNIQVKEVTQNEGTKTIANNLTSTIQVFTDSEYQLPYVLGSAHQGCLPPFPADVFMIPQYGYLTLNNGSQAVGRSSFYCLEYFPSQMLKTGNNFQFTYTFEDVPFHSSYAHSQSLDRLMNPLIDQYLYYLSRTQTTGGTTNTQTLGFSQGGPNTMANQAKNWLPGPCYRQQRVSKTSADNNNSEYSWTGATKYHLNGRDSLVNPGPAMASHKDDEEKFFPQSGVLIFGKQGSEKTNVDIEKVMITDEEEIRTTNPVATEQYGSVSTNLQRGNRQAATADVNTQGVLPGMVWQDRDVYLQGPIWAKIPHTDGHFHPSPLMGGFGLKHPPPQILIKNTPVPADPPTTFNQSKLNSFITQYSTGQVSVEIEWELQKENSKRWNPEIQYTSNYYKSTSVDFAVNTEGVYSEPRPIGTRYLTRNL

SEQ ID NO: 169 - protein, 737 aa, Artificial Sequence
  source: /note="Description of Artificial Sequence: Synthetic polypeptide"
MAADGYLPDWLEDTLSEGIRQWWKLKPGPPPPKPAERHKDDSRGLVLPGYKYLGPFNGLDKGEPVNEADAAALEHDKAYDRQLDSGDNPYLKYNHADAEFQERLKEDTSFGGNLGRAVFQAKKRLLEPLGLVEEAAKTAPGKKRPVEHSPVEPDSSSGTGKAGQQPARKRLNFGQTGDADSVPDPQPIGEPPAAPSGVGSLTMAAGGGAPMADNNEGADGVGNSSGNWHCDSTWMGDRVITTSTRTWALPTYNNHLYKQISNSTSGGSSNDNAYFGYSTPWGYFDFNRFHCHFSPRDWQRLINNNWGFRPKRLSFKLFNIQVKEVTQNEGTKTIANNLTSTIQVFTDSEYQLPYVLGSAHQGCLPPFPADVFMIPQYGYLTLNNGSQAVGRSSFYCLEYFPSQMLKTGNNFQFTYTFEDVPFHSSYAHSQSLDRLMNPLIDQYLYYLSRTQTTGGTTNTQTLGFSQGGPNTMANQAKNWLPGPCYRQQRVSKTSADNNNSEYSWTGATKYHLNGRDSLVNPGPAMASHKDDEEKFFPQSGVLIFGKQGSEKTNVDIEKVMITDEEEIRTTNPVATEQYGSVSTNLQQGNTQAATADVNTQGVLPGMVWQDRDVYLQGPIWAKIPHTDGHFHPSPLMGGFGLKHPPPQILIKNTPVPADPPTTFNQSKLNSFITQYSTGQVSVEIEWELQKENSKRWNPEIQYTSNYYKSTSVDFAVNTEGVYSEPRPIGTRYLTRNL

SEQ ID NO: 170 - protein, 737 aa, Artificial Sequence
  source: /note="Description of Artificial Sequence: Synthetic polypeptide"
MAADGYLPDWLEDTLSEGIRQWWKLKPGPPPPKPAERHKDDSRGLVLPGYKYLGPFNGLDKGEPVNEADAAALEHDKAYDRQLDSGDNPYLKYNHADAEFQERLKEDTSFGGNLGRAVFQAKKRLLEPLGLVEEAAKTAPGKKRPVEHSPVEPDSSSGTGKAGQQPARKRLNFGQTGDADSVPDPQPIGEPPAAPSGVGSLTMAAGGGAPMADNNEGADGVGNSSGNWHCDSTWMGDRVITTSTRTWALPTYNNHLYKQISNSTSGGSSNDNAYFGYSTPWGYFDFNRFHCHFSPRDWQRLINNNWGFRPKRLSFKLFNIQVKEVTQNEGTKTIANNLTSTIQVFTDSEYQLPYVLGSAHQGCLPPFPADVFMIPQYGYLTLNNGSQAVGRSSFYCLEYFPSQMLRTGNNFQFTYTFEDVPFHSSYAHSQSLDRLMNPLIDQYLYYLSRTQTTGGTTNTQTLGFSQGGPNTMANQAKNWLPGPCYRQQRVSKTSADNNNSEYSWTGATKYHLNGRDSLVNPGPAMASHKDDEEKFFPQSGVLIFGKQGSEKTNVDIEKVMITDEEEIRTTNPVATEQYGSVSTNLQQGNTQAATADVNTQGVLPGMVWQDRDVYLQGPIWAKIPHTDGHFHPSPLMGGFGLKHPPPQILIKNTPVPADPPTTFNQSKLNSFITQYSTGQVSVEIEWELQKENSKRWNPEIQYTSNYYKSTSVDFAVNTEGVYSEPRPIGTRYLTRNL

SEQ ID NO: 171 - protein, 729 aa, Artificial Sequence
  source: /note="Description of Artificial Sequence: Synthetic polypeptide"
MAADGYLPDWLEDNLSEGIREWWDLKPGAPKPKANQQKQDDGRGLVLPGYKYLGPFNGLDKGEPVNAADAAALEHDKAYDQQLKAGDNPYLRYNHADAEFQERLQEDTSFGGNLGRAVFQAKKRVLEPLGLVEEGAKTAPGKKRPIDSPDSSTGIGKKGQQPAKKKLNFGQTGDSESVPDPQPLGEPPAAPSSVGSGTMAAGGGAPTADNNEGADGVGNASGNWHCDSTWLGDRVITTSTRTWALPTYNNHLYKQISSSSSGATNDNHYFGYSTPWGYFDFNRFHCHFSPRDWQRLINNNWGFRPKKLRFKLFNIQVKEVTTNDGVTTIANNLTSTVQVFSDSEYQLPYVLGSAHQGCLPPFPADVFMIPQYGYLTLNNGSQSVGRSSFYCLEYFPSQMLRTGNNFEFSYSFEDVPFHSSYAHSQSLDRLMNPLIDQYLYYLARTQSTTGSTRELQFHQAGPNTMAEQSKNWLPGPCYRQQRLSKNLDFNNNSNFAWTAATKYHLNGRNSLTNPGIPMATNKDDEDQFFPINGVLVFGKTGAANKTTLENVLMTSEEEIKTTNPVATEEYGVVSSNLQSSTAGPQSQTINSQGALPGMVWQNRDVYLQGPIWAKIPHTDGNFHPSPLMGGFGLEHPPPQILIKNTPVPANPPEVFTPAKFASFITQYSTGQVSVEIEWELQKENSKRWNPEIQYTSNYAKSNNVEFAVNPDGVYTEPRPIGTRYLTRNL

SEQ ID NO: 172 - DNA, 3075 bp, Artificial Sequence
  source: /note="Description of Artificial Sequence: Synthetic polynucleotide"
tgagaactttcctttcaacgattgcgtcggacaagatggtgatctggtgggaggaggggaagatgaccgccaaggtcgtggagtcggccaaagccattcttggaggaagcaaggtgcgtgtggaccagaaatgcaagtcctcggcccagatagacccgactcccgtgatcgtcacctccaacaccaacatgtgcgccgtgattgacgggaactcaacgaccttcgagcaccagcagccgttgcaagaccggatgttcaaatttgaacttacccgccgtctggatcatgactttggaaaggtcaccaagcaggaagtgaaagactttttccggtgggcaaaggatcacgtggttgaggtggagcatgaattctacgtcaaaaagggtggagctaagaaaagacccgcccccagtgacgcagatataagtgagcccaaacgggcgcgcgagtcagttgcgcagccatcaacgtcagacgcggaagcttcgatcaactacgcggacaggtaccaaaaacaaatgttctcgtcacgtgggcatgaatctgatgctgtttccctgcagacaatgcgagagaatgaatcagaattcaaatatctgcttcactcacggacagaaagactgtttagagtgctttcccgtgtcagaatctcaacccgtttctgtcgtcaaaaaggcgtatcagaaactgtgctacattcatcatatcatgggaaaggtgccagacgcttgcactgcctgcgatctggtcaatgtggatttggatgactgcatctctgaacaataaatgatttaaatcaggtatggctgccgatggttatcctccagattggctcgaggacactctctctgaagggataagacagtggtggaagctcaaacctggcccaccaccaccaaagcccgcagagcggcataaggacgacagcaggggtcttgtgcttcctgggtacaagtacctcggacccttcaacggactcgacaagggggagccggtcaacgaggcagacgccgcggccctcgagcacgacaaggcctacgaccggcagctcgacagcggagacaacccgtacctcaagtacaaccacgccgacgcagagtttcaggagcgccttaaagaagatacgtcttttgggggcaacctcggacgagcagtcttccaggcgaaaaagagggttcttgaacctctgggcctggttgaggaacctgttaagacggctccgggaaaaaagaggccggtagagcactctcctgtggagccagactcctcctcgggaaccggaaaagcgggccagcggcctgcaagaaaaagattaaattttggtcagactggagacgcagactccgtacctgacccccagcctctcggacagccaccagcagccccctctggtctgggatctactacaatggctacaggcagtggcgcaccaatggcagacaataacgagggtgccgatggagtgggtaattcctcaggaaattggcattgcgattcccaatggctgggcgacagagtcatcaccaccagcacccgaacctgggccctgcccacatacaacaaccacctctacaagcaaatctccagccaatcaggagccagcaacgacaaccactactttggctacagcaccccctgggggtattttgacttcaacagattccactgccacttttcaccacgtgactggcaaagactcatcaacaacaactggggattccggcccaaaagactcaacttcaagctctttaatattcaagtcaaagaggtcacgcagaatgacggtacgacgacgattgccaataaccttaccagcacggttcaggtgtttactgactcggagtaccagctcccgtacgtcctgggctcggcgcatcaaggatgcctcccgccgtttccagcggacgtcttcatggtcccacagtatggatacctcaccctgaacaacgggagtcaggcggtaggacgctcttccttttactgcctggagtactttccttctcagatgctgcgtactggaaacaactttcagttcagctacacttttgaagacgtgcctttccacagcagctacgctcacagccagagtctggatcggctgatgaatcctctgatcgaccagtacctgtattatctgaacaagacacaaacaaatagtggaactcttcagcagtctcggctactgtttagccaagctggaccaaccaacatgtctcttcaagctaaaaactggctgcctggaccttgctacagacagcagcgtctgtcaaaacaggcaaacgacaacaacaacagcaactttccctggactgcagctacaaagtatcatctaaatggccgggactcgttggttaatccaggaccagctatggccagtcacaaggatgacgaagaaaagtttttccccatgcatggaaccctgatatttggtaaacaaggaacaaatgccaacgacgcggatttggaaaatgtcatgattacagatgaagaagaaatcagggccaccaatcccgtggctacggagcagtacgggactgtgtcaaataatttgcaaaactcaaacactggtccaactactggaactgtcaatcgccaaggagcgttacctggtatggtgtggcaggatcgagacgtgtacctgcagggacccatttgggccaagattcctcacaccgatggacactttcatccttctccactgatgggaggttttggactcaaacacccgcctcctcagatcatgatcaaaaacactcccgttccagccaatcctcccacaaacttcagttctgccaagtttgcttctttcatcacacagtattccacgggacaggtcagcgtggagatcgagtgggagctgcagaaggagaacagcaaacgctggaatcccgaaattcagtacacttccaactacaacaagtctgttaatgtggactttactgtggacactaatggtgtgtattcagagcctcgccccattggcaccagatacctgactcgtaatctgtaattgcttgttaatcaataaaccgtttaattcgtttcagttgaactttggtctctgcgaagggcgaa

SEQ ID NO: 173 - DNA, 3142 bp, Artificial Sequence
  source: /note="Description of Artificial Sequence: Synthetic polynucleotide"
aaaacgacgggccagtgattgtaatacgactcactatagggcgaaattgaaattagcggccgcgaattcgcctttcgcagagaccaaagttcaactgaaacgaattaaacggtttattgattaacaagcaattacagattacgagtcaggtatctggtgccaatggggcgaggctctgaatacacaccattagtgtccacagtaaagtccacattaacagacttgttgtagttggaagtgtactgaatttcgggattccagcgtttgctgttctccttctgcagctcccactcgatctccacgctgacctgtcccgtggaatactgtgtgatgaaagaagcaaacttggcagaactgaagtttgtgggaggattggctggaacgggagtgtttttgatcatgatctgaggaggcgggtgtttgagtccaaaacctcccatcagtggagaaggatgaaagtgtccatcggtgtgaggaatcttggcccaaatgggtccctgcaggtacacgtctcgatcctgccacaccataccaggtaacgctccttggtgattgacagttccagtagttggaccagtgtttgagttttgcaaattatttgacacagtcccgtactgctccgtagccacgggattggtggccctgatttcttcttcatctgtaatcatgacattttccaaatccgcgtcgttggcatttgttccttgtttaccaaatatcagggttccatgcatggggaaaaacttttcttcgtcatccttgtgactggccatagctggtcctggattaaccaacgagtcccggccatttagatgatactttgtagctgcagtccagggaaagttgctgttgttgttgtcgtttgcctgttttgacagacgctgctgtctgtagcaaggtccaggcagccagtttttagcttgaagagacatgttggttggtccagcttggctaaacagtagccgagactgctgaagagttccactatttgtttgtgtcttgttcagataatacaggtactggtcgatcagaggattcatcagccgatccagactctggctgtgagcgtagctgctgtggaaaggcacgtcttcaaaagtgtagctgaactgaaagttgtttccagtacgcagcatctgagaaggaaagtactccaggcagtaaaaggaagagcgtcctaccgcctgactcccgttgttcagggtgaggtatccatactgtgggaccatgaagacgtccgctggaaacggcgggaggcatccttgatgcgccgagcccaggacgtacgggagctggtactccgagtcagtaaacacctgaaccgtgctggtaaggttattggcaatcgtcgtcgtaccgtcattctgcgtgacctctttgacttgaatattaaagagcttgaagttgagtcttttgggccggaatccccggttgttgttgacgagtctttgccagtcacgtggtgaaaagtggcagtggaatctgttgaagtcaaaatacccccagggggtgctgtagccaaagtagtggttgtcgttgctggctcctgattggctggagatttgcttgtagaggtggttgttgtatgtgggcagggcccaggttcgggtgctggtggtgatgactctgtcgcccagccattgggaatcgcaatgccaatttcctgaggaattacccactccatcggcaccctcgttattgtctgccattggtgcgccactgcctgtagccattgtagtagatcccagaccagagggggctgctggtggctgtccgagaggctgggggtcaggtacggagtctgcgtctccagtctgaccaaaatttaatctttttcttgcaggctgctggcccgcttttccggttcccgaggaggagtctggctccacaggagagtgctctaccggcctcttttttcccggagccgtcttaacaggctcctcaaccaggcccagaggttcaagaaccctctttttcgcctggaagactgctcgtccgaggttgcccccaaaagacgtatcttctttaaggcgctcctgaaactctgcgtcggcgtggttgtacttgaggtacgggttgtctccgctgtcgagctgccggtcgtaggccttgtcgtgctcgagggccgcggcgtctgcctcgttgaccggctcccccttgtcgagtccgttgaagggtccgaggtacttgtacccaggaagcacaagacccctgctgtcgtccttatgccgctctgcgggctttggtggtggtgggccaggtttgagcttccaccactgtcttattccttcagagagagtgtcctcgagccaatctggaagataaccatcggcagccatacctgatttaaatcatttattgttcagagatgcagtcatccaaatccacattgaccagatcgcaggcagtgcaagcgtctggcacctttcccatgatatgatgaatgtagcacagtttctgatacgcctttttgacgacagaaacgggttgagattctgacacgggaaagcactctaaacagtctttctgtccgtgagtgaagcagatatttgaattctgattcattctctcgcattgtctgcagggaaacagcatcagattcatgcccacgtgacgagaacatttgttttggtacctgtccgcgtagttgatcgaagcttccgcgtctgacgtcgatggctgcgcaactgactcgcgcgcccgtttgggctcacttatatctgcgtcactgggggcgggtcttttcttagctccaccctttttgacgtagaattcatgctccacctcaaccacgtgatcctttgcccaccggaaaaagtctttcacttcctgcttggtgacctttccaaagtcatgatccagacggcgggtaagttcaaatttgaacatccggtcttgcaacggctgctggtgctcgaaggtcgttgagttcccgtcaatcacggcgcacatgttggtgttggaggtgacgatcacgggagtcgggtctatctgggccgaggacttgcatttctggtccacacgcaccttgcttcctccaagaatggctttggccgactccacgaccttggcggtcatcttcccctcctcccaccagatcaccatcttgtcgacgcaatggtaaaaggaaagttctcattgg

SEQ ID NO: 174 - protein, 735 aa, Adeno-associated virus 2
MAADGYLPDWLEDTLSEGIRQWWKLKPGPPPPKPAERHKDDSRGLVLPGYKYLGPFNGLDKGEPVNEADAAALEHDKAYDRQLDSGDNPYLKYNHADAEFQERLKEDTSFGGNLGRAVFQAKKRVLEPLGLVEEPVKTAPGKKRPVEHSPVEPDSSSGTGKAGQQPARKRLNFGQTGDADSVPDPQPLGEPPATPAAVGPTTMASGGGAPMADNNEGADGVGNASGNWHCDSTWLGDRVITTSTRTWALPTYNNHLYKQISSASTGASNDNHYFGYSTPWGYFDFNRFHCHFSPRDWQRLINNNWGFRPKRLNFKLFNIQVKEVTQNDGTTTIANNLTSTVQVFTDSEYQLPYVLGSAHQGCLPPFPADVFMIPQYGYLTLNNGSQAVGRSSFYCLEYFPSQMLRTGNNFTFSYTFEDVPFHSSYAHSQSLDRLMNPLIDQYLYYLNRTQNQSGSAQDKALLFSRGSPAGMSVQPKNWLPGPCYRQQRVSKTKTDNNNSNFTWTGASKYNLNGRESIINPGTAMASHKDDKDKFFPMSGVMIFGKESAGASNTALDNVMITDEEEIKATNPVATERFGTVAVNFQSSSTDPATGDVHVMGALPGMVWQDRDVYLQGPIWAKIPHTDGHFHPSPLMGGFGLKHPPPQILIKNTPVPANPPAEFSATKFASFITQYSTGQVSVEIEWELQKENSKRWNPEVQYTSNYAKSANVDFTVDNNGLYTEPRPIGTRYLTRP

SEQ ID NO: 175 - protein, 740 aa, Adeno-associated virus 2
MAADGYLPDWLEDTLSEGIRQWWKLKPGPPPPKPAERHKDDSRGLVLPGYKYLGPFNGLDKGEPVNAADAAALEHDKAYDRQLDSGDNPYLKYNHADAEFQERLKEDTSFGGNLGRAVFQAKKRVLEPLGLVEEPVKTAPGKKRPVEHSPVEPDSSSGTGKAGQQPARKRLNFGQTGDADSVPDPQPLGQPPAAPSGLGTNTMATGSGAPMADNNEGADGVGNSSGNWHCDSTWMGDRVITTSTRTWALPTYNNHLYKQISSQSGASNDNHYFGYSTPWGYFDFNRFHCHFSPRDWQRLINNNWGFRPKRLNFKLFNIQVKEVTQNDGTTTIANNLTSTVQVFTDSEYQLPYVLGSAHQGCLPPFPADVFMVPQYGYLTLNNGSQAVGRSSFYCLEYFPSQMLRTGNNFTFSYTFEDVPFHSSYAHSQSLDRLMNPLIDQYLYYLSRTNTPSGTTTQSGLQFSQAGASDIRDQSRNWLPGPCYRQQRVSKTSADNNNSEYSWTGATKYHLNGRDSLVNPGPAMASHKDDEEKFFPQSGVLIFGKQGSEKTNVDIEKVMITDEEEIRTTNPVATEQYGSVSTNLQRGNRQAATADVNTQGVLPGMVWQDRDVYLQGPIWAKIPHTDGHFHPSPLMGGFGLKHPPPQILIKNTPVPANPSTTFSAAKFASFITQYSTGQVSVEIEWELQKENSKRWNPEIQYTSNYNKSVNVDFTVDTNGVYSEPRPIGTRYLTRNLLLAAA

SEQ ID NO: 176 - protein, 734 aa, Adeno-associated virus 2
MAADGYLPDWLEDTLSEGIRQWWKLKPGPPPPKPAERHKDDSRGLVLPGYKYLGPFNGLDKGEPVNEADAAALEHDKAYDRQLDSGDNPYLKYNHADAEFQERLKEDTSFGGNLGRAVFQAKKRVLEPLGLVEEPVKTAPGKKRPVEHSPVEPDSSSGTGKAGQQPARKRLNFGQTGDADSVPDPQPLGQPPAAPSGLGTNTMATGSGAPMADNNEGADGVGNSSGNWHCDSTWMGDRVITTSTRTWALPTYNNHLYKQISSQSGASNDNHYFGYSTPWGYFDFNRFHCHFSPRDWQRLINNNWGFRPKRLNFKLFNIQVKEVTQNDGTTTIANNLTSTVQVFTDSEYQLPYVLGSAHQGCLPPFPADVFMVPQYGYLTLNNGSQAVGRSSFYCLEYFPSQMLRTGNNFTFSYTFEDVPFHSSYAHSQSLDRLMNPLIDQYLYYLSRTNTPSGTTTQSGLQFSQAGASDIRDQSRNWLPGPCYRQQRVSKTSADNNNSEYSWTGATMYHLNGRDSLVNPGPAMASHKDDEEKFFPQSGVLIFGKQGSEKTNVDIEKVMITDEEEIRTTNPVATEQYGSVSTNLQRGNRQAATADVNTQGVLPGMVWQDRDVYLQGPIWAKIPHTDGHFHPSPLMGGFGLKHPPPQILIKNTPVPANPSTTFSAAKFASFITQYSTGQVSVEIEWELQKENSKRWNPEIQYTSNYNKSINVDFTVDTNGVYSEPRPIGTRYLTRN

SEQ ID NO: 177 - protein, 734 aa, Adeno-associated virus 2
MAADGYLPDWLEDTLSEGIRQWWKLKPGPPPPKPAERHKDDSRGLVLPGYKYLGPFNGLDKGEPVNEADAAALEHDKAYDRQLDSGDNPYLKYNHADAEFQERLKEDTSFGGNLGRAVFQAKKRVLEPLGLVEEPVKTAPGKKRPVEHSPVEPDSSSGTGKAGQQPARKRLNFGQTGDADSVPDPQPLGQPPAAPSGLGTNTMATGSGAPMADNNEGADGVGNSSGNWHCDSTWMGDRVITTSTRTWALPTYNNHLYKQISSQSGASNDNHYFGYSTPWGYFDFNRFHCHFSPRDWQRLINNNWGFRPKRLNFKLFNIQVKEVTQNDGTTTIANNLTSTVQVFTDSEYQLPYVLGSAHQGCLPPFPADVFMVPQYGYLTLNNGSQAVGRSSFYCLEYFPSQMLRTGNNFTFSYTFEDVPFHSSYAHSQSLDRLMNPLIDQYLYYLSRTNTPSGTTTQSGLQFSQAGASDIRDQSRNWLPGPCYRQQRVSKTSADNNNSEYSWTGATKYHLNGRDSLVNPGPAMASHKDDEEKFFPQSGVLIFGKQGSEKTNVDIEKVMITDEEEIRTTNPVATEQYGSVSTNLQRGNRQAATADVNTQGVLPGMVWQDRDVYLQGPIWAKIPHTDGHFHPSPLMGGFGLKHPPPQILIKNTPVPANPSTTFSEAKFASFITQYSTGQVSVEIEWELQKENSKRWNPEIQYTSNYNKSVNVDFTVDTNGVYSEPRPIGTRYLTRN

SEQ ID NO: 178 - protein, 739 aa, Adeno-associated virus 2
MAADGYLPDWLEDTLSEGIRQWWKLKPGPPPPKPAERHKDDSRGLVLPGYKYLGPFNGLDKGEPVNEADAAALEHDKAYDRQLDSGDNPYLKYNHADAEFQERLKEDTSFGGNLGRAVFQAKKRVLEPLGLVEEPVKTAPGKKRPVEHSPVEPDSSSGTGKAGQQPARKRLNFGQTGDADSVPDPQPLGQPPAAPSGLGTNTMATGSGAPMADNNEGADGVGNSSGNWHCDSTWMGDRVITTSTRTWALPTYNNHLYKQISSQSGASNDNHYFGYSTPWGYFDFNRFHCHFSPRDWQRLINNNWGFRPKRLNFKLFNIQVKEVTQNDGTTTIANNLTSTVQVFTDSEYQLPYVLGSAHQGCLPPFPADVFMVPQYGYLTLNNGSQAVGRSSFYCLEYFPSQMLRTGNNFTFSYTFEDVPFHSSYAHSQSLDRLMNPLIDQYLYYLSRTNTPSGTTTQSGLQFSQAGASDIRDQSRNWLPGPCYRQQRVSKTSADNNNSEYSWTGATKYHLNGRDSLVNPGPAMASHKDDEEKFFPQSGVLIFGKQGSEKTNVDIEKVMITDEEEIRTTNPVATEQYGSVSTNLQRGNRQAATADVNTQGVLPGMVWQDRDVYLQGPIWAKIPHTDGHFHPSPLMGGFGLKHPPPQILIKNTPVPANPSTTFSAAKFASFITQYSTGQVSVEIEWELQKENSKRWNPEIQYTSNYNKSVNVDFTVDTNGVYSEPRPIGTRYLTRNLLLAA

SEQ ID NO: 179 - protein, 725 aa, Adeno-associated virus 2
MAADGYLPDWLEDTLSEGIRQWWKLKPGPPPPKPAERHKDDSRGLVLPGYKYLGPFNGLDKGEPVNEADAAALEHDKAYDRQLDSGDNPYLKYNHADAEFQERLKEDTSFGGNLGRAVFQAKKRVLEPLGLVEEPVKTAPGKKRPVEHSPVEPDSSSGTGKAGQQPARKRLNFGQTGDADSVPDPQPLGQPPAAPSGLGTNTMATGSGAPMADNNEGADGVGNSSGNWHCDSTWMGDRVITTSTRTWALPTYNNHLYKQISSQSGASNDNHYFGYSTPWGYFDFNRFHCHFSPRDWQRLINNNWGFRPKRLNFKLFNIQVKEVTQNDGTTTIANNLTSTVQVFTDSEYQLPYVLGSAHQGCLPPFPADVFMVPQYGYLTLNNGSQAVGRSSFYCLEYFPSQMLRTGNNFTFSYTFEDVPFHSSYAHSQSLDRLMNPLIDQYLYYLSRTNTPSGTTTQSGLQFSQAGASDIRDQSRNWLPGPCYRQQRVSKTSADNNNSEYSWTGATKYHLNGRDSLVNPGPAMASHKDDEEKFFPQSGVLIFGKQGSEKTNVDIEKVMITDEEEIRTTNPVATEQYGSVSTNLQRGNRQAATADVNTQGVLPGMVWQDRDVYLQGPIWAKIPHTDGHFHPSPLMGGFGLKHPPPQILIKNTPVPANPSTTFSAAKFASFITQYSTGQVSVEIEWELQKENSKRWNPEIQYTSNYNKSVNVDFTVDTNGVYSEPRP

SEQ ID NO: 180 - protein, 707 aa, Adeno-associated virus 2
MAADGYLPDWLEDTLSEGIRQWWKLKPGPPPPKPAERHKDDSRGLVLPGYKYLGPFNGLDKGEPVNEADAAALEHDKAYDRQLDSGDNPYLKYNHADAEFQERLKEDTSFGGNLGRAVFQAKKRVLEPLGLVEEPVKTAPGKKRPVEHSPVEPDSSSGTGKAGQQPARKRLNFGQTGDADSVPDPQPLGQPPAAPSGLGTNTMATGSGAPMADNNEGADGVGNSSGNWHCDSTWMGDRVITTSTRTWALPTYNNHLYKQISSQSGASNDNHYFGYSTPWGYFDFNRFHCHFSPRDWQRLINNNWGFRPKRLNFKLFNIQVKEVTQNDGTTTIANNLTSTVQVFTDSEYQLPYVLGSAHQGCLPPFPADVFMVPQYGYLTLNNGSQAVGRSSFYCLEYFPSQMLRTGNNFTFSYTFEDVPFHSSYAHSQSLDRLMNPLIDQYLYYLSRTNTPSGTTTQSGLQFSQAGASDIRDQSRNWLPGPCYRQQRVSKTSADNNNSEYSWTGATKYHLNGRDSLVNPGPAMASHKDDEEKFFPQSGVLIFGKQGSEKTNVDIEKVMITDEEEIRTTNPVATEQYGSCIYQPPERQQTSSYRRCQHTRRSSRHGLAGQRCVPSGAHLGKDSTHGRTFSPLSPHGWIRTTPSSTDSHQEHPGTCESFDHLQCGKVCFLHHTVLHGTGQRGDRVRAAEGKQQTLESRNSVHFQLQQVC

SEQ ID NO: 181 - protein, 739 aa, Adeno-associated virus 2; identical to SEQ ID NO: 178

SEQ ID NO: 182 - protein, 737 aa, Adeno-associated virus 2
MASDGYLPDWLEDNLSEGIREWWDLKPGAPKPKANQQKQDDGRGLVLPGYKYLGPFNGLDKGEPVNAADAAALEHDKAYDQQLKAGDNPYLRYNHADAEFQERLQEDTSFGGNLGRAVFQAKKRVLEPFGLVEEGAKTAPGKKRPVEQSPQEPDSSSGIGKTGQQPAKKRLNFGQTGDSESVPDPQPLGEPPATPAAVGPTTMASGGGAPMADNNEGADGVGNASGNWHCDSTWLGDRVITTSTRTWALPTYNNHLYKQISSASTGASNDNHYFGYSTPWGYFDFNRFHCHFSPRDWQRLINNNWGFRPKRLNFKLFNIQVKEVTTNDGTTTIANNLTSTVQVFTDSEYQLPYVLGSAHQGCLPPFPADVFMVPQYGYLTLNNGSQAVGRSSFYCLEYFPSQMLRTGNNFTFSYTFEDVPFHSSYAHSQSLDRLMNPLIDQYLYYLSRTNTPSGTTTQSGLQFSQAGASDIRDQSRNWLPGPCYRQQRVSKTSADNNNSEYSWTGATKYHLNGRDSLVNPGPAMASHKDDEEKFFPQSGVLIFGKQGSEKTNVDIEKVMITDEEEIRTTNPVATEQYGSVSTNLQRGNRQAATADVNTQGVLPGMVWQDRDVYLQGPIWAKIPHTDGHFHPSPLMGGFGLKHHPPQILIKNTPVPANPSTTFSAAKFASFITQYSTGQVSVEIEWELQKENSKRWNPEIQYTSNYNKSVNVDFTVDTNGVYSEPRPIGTRYLTRNLL

SEQ ID NO: 183 - protein, 741 aa, Adeno-associated virus 2
MAADGYLPDWLEDTLSEGIREWWALKPGAPKPKANQQKQDDGRGLVLPGYKYLGPFNGLDKGEPVNEADAAALEHDKAYDQQLQAGDNPYLRYNHADAEFQERLQEDTSFGGNLGRAVFQAKKRVLEPLGLVEEPVKTAPGKKRPVEHSPVEPDSSSGTGKSGQQPARKRLNFGQTGDADSVPDPQPLGQPPAAPSGLGTNTMATGSGAPMADNNEGADGVGNSSGNWHCDSTWMGDRVITTSTRTWALPTYNNHLYKQISSQSGASNDNHYFGYSTPWGYFDFNRFHCHFSPRDWQRLINNNWGFRPKRLNFKLFNIQVKEVTQNDGTTTIANNLTSTVQVFTDSEYQLPYVLGSAHQGCLPPFPADVFMVPQYGYLTLNNGSQAVGRSSFYCLEYFPSQMLRTGNNFTFSYTFEDVPFHSSYAHSQSLDRLMNPLIDQYLYYLSRTNTPSGTTTQSGLQFSQAGASDIRDQSRNWLPGPCYRQQRVSKTSADNNNSEYSWTGATKYHLNGRDSLVNPGPAMASHKDDEEKFFPQSGVLIFGKQGSEKTNVDIEKVMITDEEEIRTTNPVATEQYGSVSTNLQRGNLANHNNTTNARQAATADVNTQGVLPGMVWQDRDVYLQGPIWAKIPHTDGHFHPSPLMGGFGLKHPPPQILIKNTPVPANPSTTFSAAKFASFITQYSTGQVSVEIEWELQKENSKRWNPEIQYTSNYNKSINVDFTVDTNGVYSEPRPIGTRYL

SEQ ID NO: 184 - protein, 730 aa, Adeno-associated virus 2
MASDGYLPDWLEDNLSEGIREWWDLKPGAPKPKANQQKQDDGRGLVLPGYKYLGPFNGLDKGEPVNAADAAALEHDKAYDQQLKAGDNPYLRYNHADAEFQERLQEDTSFGGNLGRAVFQAKKRVLEPFGLVEEGAKTAPGKKRPVEQSPQEPDSSSGIGKTGQQPAKKRLNFGQTGDSESVPDPQPLGEPPATPAAVGPTTMASGGGAPMADNNEGADGVGNASGNWHCDSTWLGDRVITTSTRTWALPTYNNHLYKQISSASTGASNDNHYFGYSTPWGYFDFNRFHCHFSPRDWQRLINNNWGFRPKRLNFKLFNIQVKEVTTNDGVTTIANNLTSTVQVFSDSEYQLPYVLGSAHQGCLPPFPADVFMIPQYGYLTLNNGSQAVGRSSFYCLEYFPSQMLRTGNNFTFSYTFEDVPFHSSYAHSQSLDRLMNPLIDQYLYYLNRTQNQSGSAQNNDLLFSRGSPAGMSVQPKNWLPGPCYRQQRVSKTKTDNNNSNFTWTGASKYNLNGRESIINPGTAMASHKDDKDKFFPMSGVMIFGKESAGASNTALDNVMITDEEEIKATNPVATERFGTVAVNLQSSSTDPATGDVHVMGALPGMVWQDRDVYLQGPIWAKIPHTDGHFHPSPLMGGFGLKNPPPQILIKNTPVPANPPAEFSATKFASFITQYSTGQVSVEIEWELQKENSKRWNPEVQYTSNYAKSANVDFTVDNNGLYTEPRPIGTR

SEQ ID NO: 185 - protein, 735 aa, Adeno-associated virus 2
  MOD_RES (239)..(239): Any amino acid
MASDGYLPDWLEDNLSEGIREWWDLKPGAPKPKANQQKQDDGRGLVLPGYKYLGPFNGLDKGEPVNAADAAALEHDKAYDQQLKAGDNPYLRYNHADAEFQERLQEDTSFGGNLGRAVFQAKKRVLEPFGLVEEGAKTAPGKKRPVEQSPQEPDSSSGIGKTGQQPAKKRLNFGQTGDSESVPDPQPLGEPPATPAAVGPTTMASGGGAPMADNNEGADGVGNASGNWHCDSTWLGDRXITTSTRTWALPTYNNHLYKQISSASTGASNDNHYFGYSTPWGYFDFNRFHCHFSPRDWQRLINNNWGFRPKRLNFKLFNIQVKEVTTNDGVTTIANNLTSTVQVFSDSEYQLPYVLGSAHQGCLPPFPADVFMIPQYGYLTLNNGSQAVGRSSFYCLEYFPSQMLRTGNNFTFSYTFEDVPFHSSYAHSQSLDRLMNPLIDQYLYYLNRTQNQSGSAQNNDLLFSRGSPAGMSVQPKNWLPGPCYRQQRVSKTKTDNNNSNFTWTGASKYNLNGRESIINPGTAMASHKDDKDKFFPMSGVMIFGKESAGASNTALDNVMITDEEEIKATNPVATERFGTVAVNLQSSSTDPATGDVHVMGALPGMVWQDRDVYLQGPIWAKIPHTDGHFHPSPLMGGFGLKNPPPQILIKNTPVPANPPAEFSATKFASFITQYSTGQVSVEIEWELQKENSKRWNPEVQYTSNYAKSANVDFTVDNNGLYTEPRPIGTRYLTRP

SEQ ID NO: 186 - protein, 733 aa, Adeno-associated virus 2
MASDGYLPDWLEDNLSEGIREWWDLKPGAPKPKANQQKQDDGRGLVLPGYKYLGPFNGLDKGEPVNAADAAALEHDKAYDQQLKAGDNPYLRYNHADAEFQERLQEDTSFGGNLGRAVFLAKKRVLEPFGLVEEGAKTAPGKKRPVEQSPQEPDSSSGIGKTGQQPAKKRLNFGQTGDSESVPDPQPLGEPPATPAAVGPTTMASGGGAPMADNNEGADGVGNASGNWHCDSTWLGDRVITTSTRTWALPTYNNHLYKQISSASTGASNDNHYFGYSTPWGYFDFNRFHCHFSPRDWQRLINNNWGFRPKRLNFKLFNIQVKEVTTNDGVTTIANNLTSTVQVFSDSEYQLPYVLGSAHQGCLPPFPADVFMIPQYGYLTLNNGSQAVGRSSFYCLEYFPSQMLRTGNNFTFSYTFEDVPFHSSYAHSQSLDRLMNPLIDQYLYYLNRTQNQSGSAQNNDLLFSRGSPAGMSVQPKNWLPGPCYRQQRVSKTKTDNNNSNFTWTGASKYNLNGRESIINPGTAMASHKDDKDKFFPMSGVMIFGKESAGASNTALDNVMITDEEEIKATNPVATERFGTVAVNLQSSSTDPATGDVHVMGALPGMVWQDRDVYLQGPIWAKIPHTDGHFHPSPLMGGFGLKNPPPQILIKNTPVPANPPAEFSATKFASFITQYSTGQVSVEIEWELQKENSKRWNPEVQYTSNYAKSANVDFTVDNNGLYTEPRPIGTRYLT

SEQ ID NO: 187 - protein, 734 aa, Adeno-associated virus 2
MAADGYLPDWLEDTLSEGIRQWWKLKPGPPPPKPAERHKDDSRGLVLPGCKYLGPFNGLDKGEPVNEADAAALEHDKAYDRQLDSGDNPYLKYNHADAEFQERLKEDTSFGGNLGRAVFQAKKRVLEPLGLVEEPVKTAPGKKRPVEHSPVEPDSSSGTGKAGQQPARKRLNFGQTGDADSVPDPQPLGQPPAAPSGLGTNTMATGSGAPMADNNEGADGVGNSSGNWHCDSTWMGDRVITTSTRTWALPTYNNHLYKQISSQSGASNDNHYFGYSTPWGYFDFNRFHCHFSPRDWQRLINNNWGFRPKRLNFKLFNIQVKEVTQNDGTTTIANNLTSTVQVFSDSEYQLPYVLGSAHQGCLPPFPADVFMIPQYGYLTLNNGSQAVGRSSFYCLEYFPSQMLRTGNNFTFNYTFEDVPFHSSYAHSQSLDRLMNPLIDQYLYYLNRTQNQSGSAQNNDLLFSRGSPAGMSVQPKNWLPGPCYRQQRVSKTKTDNNNSNFTWTGASKYNLNGRESIINPGTAMASHKDDKDKFFPMSGVMIFGKESAGASNTALDNVMITDEEEIKATNPVATERFGTVAVNLQSSSTDPATGDVHVMGALPGMVWQDRDVYLQGPIWAKIPHTDGHFHPSPLMGGFGLKNPPPQILIKNTPVPANPPAEFSATKFASFITQYSTGQVSVEIEWELQKENSKRWNPEVQYTSNYAKSANVDFTVDNNGLYTEPRPIGTRYLTRP

SEQ ID NO: 188 - protein, 734 aa, Adeno-associated virus 2
MAADGYLPDWLEDTLSEGIRQWWKLKPGPPPPKPAERHKDDSRGLVLPGYKYLGPFNGLDKGEPVNEADAAALEHDKAYDRQLDSGDNPYLKYNHADAEFQERLKEDTSFGGNLGRAVFQAKKRVLEPLGLVEEPVKTAPGKKRPVEHSPVEPDSSSGTGKAGQQPARKRLNFGQTGDADSVPDPQPLGQPPAAPSGLGTNTMATGSGAPMADNNEGADGVGNSSGNWHCDSTWMGDRVITTSTRTWALSTYNNHLYKQISSQSGASNDNHYFGYSTPWGYFDFNRFHCHFSPRDWQRLINNNWGFRPKRLNFKLFNIQVKEVTQNDGTTTIANNLTSTVQVFTDSEYQLPYVLGSAHQGCLPPFPADVFMVPQYGYLTLNNGSQAVGRSSFYCLEYFPSQMLRTGNNFTFSYTFEDVPFHSSYAHSQSLDRLMNPLIDQYLYYLSRTNTPSGTTTQSRLQFSQAGASDIRDQSRNWLPGPCYRQQRVSKTSADNNNSEYSWTGATKYHLNGRDSLVNPGPAMASHKDDEEKFFPQSGVLIFGKQGSEKTNVDIEKVMITDEEEIRTTNPVATEQYGSVSTNLQRGNRQAATADVNTQGVLPGMVWQDRDVYLQGPIWAKIPHTDGHFHPSPLMGGFGLKHPPPQILIKNTPVPANPSTTFSAAKFASFITQYSTGQVSVEIEWELQKENSKRWNPEIQYTSNYNKSINVDFTVDTNGVYSEPRPIGTRYLTRN

SEQ ID NO: 189 - protein, 738 aa, Adeno-associated virus 2
MAADGYLPDWLEDTLSEGIRQWWKLKPGPPPPKPAERHKDDSRGLVLPGYKYLGPFNGLDKGEPVNEADAAALEHDKAYDRQLDGGDNPYLKYNHADAEFQERLKEDTSFGGNLGRAVFQAKKRVLEPLGLVEEPVKTAPGKKRPVEHSPVEPDSSSGTGKAGQQPARKRLNFGQTGDADSVPDPQPLGQPPAAPSGLGTNTMATGSGAPMADNNEGADGVGNSSGNWHCDSTWMGDRVITTSTRTWALPTYNNHLYKQISSQSGASNDNHYFGYSTPWGYFDFNRFHCHFSPRDWQRLINNNWGFRPKRLNFKLFNIQVKEVTQNDGTTTIANNLTSTVQVFTDSEYQLPYVLGSAHQGCLPPFPADVFMVPQYGYLTLNNGSQAVGRSSFYCLEYFPSQMLRTGNNFTFSYTFEDVPFHSSYAHSQSLDRLMNPLIDQYLYYLSRTNTPSGTTTQSGLQFSQAGASDIRDQSRNWLPGPCYRQQRVSKTSADNNNSEYSWTGATKYHLNGRDSLVNPGPAMASHKDDEEKFFPQSGVLIFGKQGSEKTNVDIEKVMITDEEEIRTTNPVATEQYGSVSTNLQRGNRQAATADVNTQGVLPGMVWQDRDVYLQGPIWAKIPHTDGHFHPSPLMGGFGLKHPPPQILIKNTPVPANPSTTFSAAKFASFITQYSTGQVSVEIEWELQKENSKRWNPEIQYTSNYNKSVNVDFTVDTNGVYSEPRPIGTRYLTRNLLRP

SEQ ID NO: 190 - DNA, 2208 bp, Artificial Sequence
  source: /note="Description of Artificial Sequence: Synthetic polynucleotide"
atggctgccgatggttatcttccagattggctcgaggacactctctctgaaggaataagacagtggtggaagctcaaacctggcccaccaccaccaaagcccgcagagcggcataaggacgacagcaggggtcttgtgcttcctgggtacaagtacctcggacccttcaacggactcgacaagggggagccggtcaacgaggcagacgccgcggccctcgagcacgacaaggcctacgaccggcagctcgacagcggagacaacccgtacctcaagtacaaccacgccgacgcagagtttcaggagcgccttaaagaagatacgtcttttgggggcaacctcggacgagcagtcttccaggcgaaaaagagggttcttgaacctctgggcctggttgaggaacctgttaagacggctccgggaaaaaagaggccggtagagcactctcctgtggagccagactcctcctcgggaaccggaaaagcgggccagcagcctgcaagaaaaagattaaattttggtcagactggagacgcagactccgtacctgacccccagcctctcggacagccaccagcagccccctctggtctgggatctactacaatggctacaggcagtggcgcaccaatggcagacaataacgagggtgccgatggagtgggtaattcctcaggaaattggcattgcgattcccaatggctgggcgacagagtcatcaccaccagcacccgaacctgggccctgcccacatacaacaaccacctctacaagcaaatctccagccaatcaggagccagcaacgacaaccactactttggctacagcaccccctgggggtattttgacttcaacagattccactgccacttttcaccacgtgactggcaaagactcatcaacaacaactggggattccggcccaaaagactcaacttcaagctctttaatattcaagtcaaagaggtcacgcagaatggcggtacgacgacgattgccaataaccttaccagcacggttcaggtgtttactgactcggagtaccagctcccgtacgtcctgggctcggcgcatcaaggatgcctcccgccgtttccagcggacgtcttcatggtcccacagtatggatacctcaccctgaacaacgggagtcaggcggtaggacgctcttccttttactgcctggagtactttccttctcagatgctgcgtactggaaacaactttcagttcagctacacttttgaagacgtgcctttccacagcagctacgctcacagccagagtctggatcggctgatgaatcctctgatcgaccagtacctgtattatctgaacaagacacaaacaaatagtggaactcttcagcagtctcggctactgtttagccaagctggaccaaccaacatgtctcttcaagctaaaaactggctgcctggaccttgctacagacagcagcgtctgtcaaaacaggcaaacggcaacaacaacagcaactttccctggactgcagctacaaagtatcatctaaatggccgggactcgttggttaatccaggaccagctatggccagtcacaaggatgacgaagaaaagtttttccccatgcatggaaccctgatatttggtaaacaaggaacaaatgccaacgacgcggatttggaaaatgtcatgattacagatgaagaagaaatcagggccaccaatcccgtggctacggagcagtacgggactgtgtcaaataatttgcaaaactcaaacactggtccaactactggaactgtcaatcaccaaggagcgttacctggtatggtgtggcaggatcgagacgtgtacctgcagggacccatttgggccaagattcctcacaccgatggacactttcatccttctccactgacgggaggttttggactcaaacacccgcctcctcagatcatgatcaaaaacactcccgttccagccaatcctcccacaaacttcagttctgccaagtttgcttctttcatcacacagtattccacgggacaggtcagcgtggagatcgagtgggagctgcagaaggagaacagcaaacgctggaatcccgaaattcagtacacttccaactacaacaagtctgttaatgtggactttactgtggacactaatggtgtgtattcagagcctcgccccattggcaccagatacctgactcgtaatctgtaa

SEQ ID NO: 191 - protein, 735 aa, Artificial Sequence
  source: /note="Description of Artificial Sequence: Synthetic polypeptide"
MAADGYLPDWLEDTLSEGIRQWWKLKPGPPPPKPAERHKDDSRGLVLPGYKYLGPFNGLDKGEPVNEADAAALEHDKAYDRQLDSGDNPYLKYNHADAEFQERLKEDTSFGGNLGRAVFQAKKRVLEPLGLVEEPVKTAPGKKRPVEHSPVEPDSSSGTGKAGQQPARKRLNFGQTGDADSVPDPQPLGQPPAAPSGLGSTTMATGSGAPMADNNEGADGVGNSSGNWHCDSQWLGDRVITTSTRTWALPTYNNHLYKQISSQSGASNDNHYFGYSTPWGYFDFNRFHCHFSPRDWQRLINNNWGFRPKRLNFKLFNIQVKEVTQNGGTTTIANNLTSTVQVFTDSEYQLPYVLGSAHQGCLPPFPADVFMVPQYGYLTLNNGSQAVGRSSFYCLEYFPSQMLRTGNNFQFSYTFEDVPFHSSYAHSQSLDRLMNPLIDQYLYYLNKTQTNSGTLQQSRLLFSQAGPTNMSLQAKNWLPGPCYRQQRLSKQANGNNNSNFPWTAATKYHLNGRDSLVNPGPAMASHKDDEEKFFPMHGTLIFGKQGTNANDADLENVMITDEEEIRATNPVATEQYGTVSNNLQNSNTGPTTGTVNHQGALPGMVWQDRDVYLQGPIWAKIPHTDGHFHPSPLTGGFGLKHPPPQIMIKNTPVPANPPTNFSSAKFASFITQYSTGQVSVEIEWELQKENSKRWNPEIQYTSNYNKSVNVDFTVDTNGVYSEPRPIGTRYLTRNL

SEQ ID NO: 192 - DNA, 2208 bp, Artificial Sequence
  source: /note="Description of Artificial Sequence: Synthetic polynucleotide"
atggctgccgatggttatcttccagattggctcgaggacactctctctgaaggaataagacagtggtggaagctcaaacctggcccaccaccaccaaagctcgcagagcggcatcaggacgacagcaggggtcttgtgcttcctgggtacaagtacctcggacccttcaacggactcgacaaaggagagccggtcaacgaggcagacgccgcggccctcgagcacgacaaggcctacgaccggcagctcgacagcggagacaacccgtacctcaagtacaaccacgccgacgcggagtttcaggagcgtcttaaagaagatacgtcttttgggggcaacctcggacgagcagtcttccaggcgaaaaagagggttcttgaacctctgggcctggttgaggaacctgttaagacggctccgggaaaaaagaggccggtagagcactctcctgtggagccagactcctcctcgggaaccggaaaggcgggccatcagcctgcgagaaagagattgaattttggtcagactggagacgcagactccgtacctgacccccagcctctcggacagccaccagcagcccccacaagtctgggatctactacaatggctacaggcagtggcgcaccaatggcagacaataacgagggtgccgatggagtgggtaattcctcaggaaattggcattgcgattcccaatggctgggcgacagagtcatcaccaccagcacccgaacctgggccctgcccacctacaacaaccacctctacaagcaaatctccagccaatcaggagcctcgaacgacaaccactactttggctacagcaccccctgggggtattttgacttcaacagattccactgtcacttctccccacgtgattggcaaagactcatcaacaacaactggggattccgacccaagagactcaacttcaagctctttaacattcaagtcaaagaggtcacgcagaatgacggtacgacgacgattgccaataaccttaccagcacggttcaggtgtttactgactcggagtaccagctcccgtacgtcctcggctcggcgcatcaaggatgcctcccgccgtttccagcggacgtcttcacggtcccacagtatggatacctcaccctgaacaacgggagtcaggcggtaggacgctcttccttttactgcctggagtactttccttctcagatgctgcgtactggaaacaaccttaccttcagctacacctttgaggacgttcctttccacagcagctacgctcacagccagagtttggaccggctgatgaatcctctgatcgaccagtatctatattatctgaacaggacacaatcaaatagtggaactcttcagcagtctaggctactgtttagccaagctggacccaccagcatgtctcttcaagctaaaaactggctgcctggaccttgctacagacagcagcgtctttcaaagcaggcaaacgacaacaacaacagcaactttccctggactgcggctacaaagtatcatctaaatggccgggactcgttggttaatccaggaccagctatggccagccacaaagacgatgaagaaaagtttttccccatgcatggaaccctgatatttggtaaacaaggaacaaatgctaacgacgcggatttggagcatgttatgattacagatgaagaagaaatcaggaccaccaatcctgtggctacagagcagtacggaaacgtgtcaaataatttgcaaaactcaaatactggtccaactacagaaaatgtcaatcaccagggagcgttacctggtatggtgtggcaggatcgagacgtgtacctgcagggacccatttgggccaagattcctcacaccgacggacactttcacccttctccactgatgggaggttttggactcaaacacccgcctcctcaaatcatgatcaaaaacactcccgttccagccaatcctcccacaaactacagttctgccaagtttgcttctttcatcacacagtattccacgggccaggtcagcgtggagattgagtgggagctgcggaaggagaacagcaaacgctggaaccccgagatccagtatacttccaactacaacaaatctgttaatgtggactttactgtggacactaatggtgtgtattcagagcctcgccccattggcaccagatacctgactcgtaatctgtaa

SEQ ID NO: 193 - protein, 735 aa, Artificial Sequence
  source: /note="Description of Artificial Sequence: Synthetic polypeptide"
MAADGYLPDWLEDTLSEGIRQWWKLKPGPPPPKLAERHQDDSRGLVLPGYKYLGPFNGLDKGEPVNEADAAALEHDKAYDRQLDSGDNPYLKYNHADAEFQERLKEDTSFGGNLGRAVFQAKKRVLEPLGLVEEPVKTAPGKKRPVEHSPVEPDSSSGTGKAGHQPARKRLNFGQTGDADSVPDPQPLGQPPAAPTSLGSTTMATGSGAPMADNNEGADGVGNSSGNWHCDSQWLGDRVITTSTRTWALPTYNNHLYKQISSQSGASNDNHYFGYSTPWGYFDFNRFHCHFSPRDWQRLINNNWGFRPKRLNFKLFNIQVKEVTQNDGTTTIANNLTSTVQVFTDSEYQLPYVLGSAHQGCLPPFPADVFTVPQYGYLTLNNGSQAVGRSSFYCLEYFPSQMLRTGNNLTFSYTFEDVPFHSSYAHSQSLDRLMNPLIDQYLYYLNRTQSNSGTLQQSRLLFSQAGPTSMSLQAKNWLPGPCYRQQRLSKQANDNNNSNFPWTAATKYHLNGRDSLVNPGPAMASHKDDEEKFFPMHGTLIFGKQGTNANDADLEHVMITDEEEIRTTNPVATEQYGNVSNNLQNSNTGPTTENVNHQGALPGMVWQDRDVYLQGPIWAKIPHTDGHFHPSPLMGGFGLKHPPPQIMIKNTPVPANPPTNYSSAKFASFITQYSTGQVSVEIEWELRKENSKRWNPEIQYTSNYNKSVNVDFTVDTNGVYSEPRPIGTRYLTRNL

SEQ ID NO: 194 - DNA, 2208 bp, Artificial Sequence
  source: /note="Description of Artificial Sequence: Synthetic polynucleotide"
atggctgccgatggttatcttccagattggctcgaggacactctctctgaaggaataagacagtggtggaagctcaaacctggcccaccaccaccaaagcccgcagagcggcatcaggacgacagcaggggtcttgtgcttcctgggtacaagtacctcggacccttcaacggactcgacaaaggagagccggtcaacgaggcagacgccgcggccctcgagcacgacaaggcctacgaccggcagctcgacagcggagacaacccgtacctcaagtacaaccacgccgacgcggagtttcaggagcgtcttaaagaagatacgtcttttgggggcaacctcggacgagcagtcttccaggcgaaaaagagggttcttgaacctctgggcctggttgaggaacctgttaagacggctccgggaaaaaagaggccggtagagcactctcctgtggagccagactcctcctcgggaaccggaaaagcgggccatcagcctgcgagaaagagattgaattttggtcagactggagacgcagactccgtacctgacccccagcctctcggacagccaccagcagcccccacaagtttgggatctactacaatggctacaggcagtggcgcaccaatggcagacaataacgagggtgccgatggagtgggtaattcctcaggaaattggcattgcgattcccaatggctgggcgacagagtcatcaccaccagcacccgaacctgggccctgcccacctacaacaaccacctctacaagcaaatctccagccaatcaggagcctcgaacgacaaccactactttggctacagcaccccctgggggtattttgacttcaacagattccactgtcacttctccccacgtgattggcaaagactcatcaacaacaactggggattccgacccaagagactcaacttcaagctctttaacattcaagtcaaggaggtcacgcagaatgacggtacgacgacgattgccaataaccttaccagcacggttcaggtgtttactgactcggagtaccagctcccgtacgtcctcggctcggcgcatcaaggatgcctcccgccgtttccagcggacgtcttcatggtcccacagtatggatacctcaccctgaacaacgggagtcaggcggtaggacgctcttccttttactgcctggagtactttccttctcagatgctgcgtactggaaacaactttaccttcagctacacctttgaggacgttcctttccacagcagctacgctcacagccagagtttggaccggctgatgaatcctctgatcgaccagtatctatattatctgaacaggacacaatcaaatagtggaactcttcagcagtctaggctactgtttagccaagctggacccaccagcatgtctcttcaagctaaaaactggctgcctggaccttgctacagacagcagcgtctttcaaagcaggcaaacgacaacaacaacagcaactttccctggactgcggctacaaagtatcgtctaaatggccgggactcgttggttaatccaggaccagctatggccagccacaaagacgatgaagaaaagtttttccccatgcatggaaccctgatatttggtaaacaaggaacaaatgctaacgacgcggatttggagcatgttatgattacagatgaagaagaaatcaggaccaccaatcctgtggctacagagcagtacggaaacgtgtcaaataatttgcaaaactcaaatactggtccaactacagaaaatgtcaatcaccagggagcgttacctggtatggtgtggcaggatcgagacgtgtacctgcagggacccatttgggccaagattcctcacaccgacggacactttcacccttctccactgatgggaggttttggactcaaacacccgcctcctcaaatcatgatcaaaaacactcccgttccagccaatcctcccacaaacttcagttctgccaagtttgcttctttcatcacacagtattccacgggccaggtcagcgtggagattgagtgggagctgcagaaggagaacagcaaacgctggaaccccgagatccagtatacttccaactacaacaaatctgttaatgtggactttactgtggacactaatggtgtgtattcagagcctcgccccattggcaccagatacctgactcgtaatctgtaa

SEQ ID NO: 195 - protein, 735 aa, Artificial Sequence
  source: /note="Description of Artificial Sequence: Synthetic polypeptide"
MAADGYLPDWLEDTLSEGIRQWWKLKPGPPPPKPAERHQDDSRGLVLPGYKYLGPFNGLDKGEPVNEADAAALEHDKAYDRQLDSGDNPYLKYNHADAEFQERLKEDTSFGGNLGRAVFQAKKRVLEPLGLVEEPVKTAPGKKRPVEHSPVEPDSSSGTGKAGHQPARKRLNFGQTGDADSVPDPQPLGQPPAAPTSLGSTTMATGSGAPMADNNEGADGVGNSSGNWHCDSQWLGDRVITTSTRTWALPTYNNHLYKQISSQSGASNDNHYFGYSTPWGYFDFNRFHCHFSPRDWQRLINNNWGFRPKRLNFKLFNIQVKEVTQNDGTTTIANNLTSTVQVFTDSEYQLPYVLGSAHQGCLPPFPADVFMVPQYGYLTLNNGSQAVGRSSFYCLEYFPSQMLRTGNNFTFSYTFEDVPFHSSYAHSQSLDRLMNPLIDQYLYYLNRTQSNSGTLQQSRLLFSQAGPTSMSLQAKNWLPGPCYRQQRLSKQANDNNNSNFPWTAATKYRLNGRDSLVNPGPAMASHKDDEEKFFPMHGTLIFGKQGTNANDADLEHVMITDEEEIRTTNPVATEQYGNVSNNLQNSNTGPTTENVNHQGALPGMVWQDRDVYLQGPIWAKIPHTDGHFHPSPLMGGFGLKHPPPQIMIKNTPVPANPPTNFSSAKFASFITQYSTGQVSVEIEWELQKENSKRWNPEIQYTSNYNKSVNVDFTVDTNGVYSEPRPIGTRYLTRNL

SEQ ID NO: 196 - DNA, 2208 bp, Artificial Sequence
  source: /note="Description of Artificial Sequence: Synthetic polynucleotide"
atggctgccgatggttatcttccagattggctcgaggacactctctctgaaggaataagacagtggtggaagctcaaacctggcccaccaccaccaaagcccgcagagcggcatcaggacgacagcaggggtcttgtgcttcctgggtacaagtacctcggacccttcaacggactcgacaaaggagagccggtcaacgaggcagacgccgcggccctcgagcacgacaaggcctacgaccggcagctcgacagcggagacaacccgtacctcaagtacaaccacgccgacgcggagtttcaggagcgtcttaaagaagatacgtcttttgggggcaacctcggacgagcagtcttccaggcgaaaaagagggttcttgaacctctgggcctggttgaggaacctgttaagacggctccgggaaaaaagaggccggtagagcactctcctgtggagccagactcctcctcgggaaccggaaaagcgggccatcagcctgcgagaaagagattgaattttggtcagactggagacgcagactccgtacctgacccccagcctctcggacagccaccagcagcccccacaagtttgggatctactacaatggctacaggcagtggcgcaccaatggcagacaataacgagggtgccgatggagtgggtaattcctcaggaaattggcattgcgattcccaatggctgggcgacagagtcatcaccaccagcacccgaacctgggccctgcccacctacaacaaccacctctacaagcaaatctccagccaatcaggagcctcgaacgacaaccactactttggctacagcaccccctgggggtattttgacttcaacagattccactgtcacttctccccacgtgattggcaaagactcatcaacaacaactggggattccgacccaagagactcaacttcaagctctttaacattcaagtcaaagaggtcacgcagaatgacggtacgacgacgattgccaataaccttaccagcacggttcaggtgtttactgactcggagtaccagctcccgtacgtcctcggctcggcgcatcaaggatgcctcccgccgtttccagcggacgtcttcatggtcccacagtatggatacctcaccctgaacaacgggagtcaggcggtaggacgcccttccttttactgcctggagtactttccttctcagatgctgcgtactggaaacaactttaccttcagctacacctttgaggacgttcctttccacagcagctacgctcacagccagagtttggaccggctgatgaatcctctgatcgaccagtatctatattatctgaacaggacacaatcaaatagtggaactcttcagcagtctaggctactgtttagccaagctggacccaccagcatgtctcttcaagctaaaaactggctgcctggaccttgctacagacagcagcgtctttcaaagcaggcaaacgacaacaacaacagcaactttccctggactgcggctacaaagtatcatctaaatggccgggactcgttggttaatccaggaccagctatggccagccacaaagacgatgaagaaaagtttttccccatgcatgggaccctgatatttggtaaacaaggaacaaatgctaacgacgcggatttggagcatgttatgattacagatgaagaagaaatcaggaccaccaatcctgtggctacagagcagtacggaaacgtgtcaaataatttgcaaaactcaaatactggtccaactacagaaaatgtcaatcaccagggagcgttacctggtatggtgtggcaggatcgagacgtgtacctgcagggacccatttgggccaagattcctcacaccgacggacactttcacccttctccactgatgggaggttttggactcaaacacccgcctcctcaaatcatgatcaaaaacactcccgttccagccaatcctcccacaaacttcagttctgccaagtttgcttctttcatcacacagtattccacgggccaggtcagcgtggagattgagtgggagctgcagaaggagaacagcaaacgctggaaccccgagatccagtatacttccaactacaacaaatctgttaatgtggactttactgtggacactaatggtgtgtattcagagcctcgccccattggcaccagatacctgactcgtaatctgtaa

SEQ ID NO: 197 - protein, 735 aa, Artificial Sequence
  source: /note="Description of Artificial Sequence: Synthetic polypeptide"
MAADGYLPDWLEDTLSEGIRQWWKLKPGPPPPKPAERHQDDSRGLVLPGYKYLGPFNGLDKGEPVNEADAAALEHDKAYDRQLDSGDNPYLKYNHADAEFQERLKEDTSFGGNLGRAVFQAKKRVLEPLGLVEEPVKTAPGKKRPVEHSPVEPDSSSGTGKAGHQPARKRLNFGQTGDADSVPDPQPLGQPPAAPTSLGSTTMATGSGAPMADNNEGADGVGNSSGNWHCDSQWLGDRVITTSTRTWALPTYNNHLYKQISSQSGASNDNHYFGYSTPWGYFDFNRFHCHFSPRDWQRLINNNWGFRPKRLNFKLFNIQVKEVTQNDGTTTIANNLTSTVQVFTDSEYQLPYVLGSAHQGCLPPFPADVFMVPQYGYLTLNNGSQAVGRPSFYCLEYFPSQMLRTGNNFTFSYTFEDVPFHSSYAHSQSLDRLMNPLIDQYLYYLNRTQSNSGTLQQSRLLFSQAGPTSMSLQAKNWLPGPCYRQQRLSKQANDNNNSNFPWTAATKYHLNGRDSLVNPGPAMASHKDDEEKFFPMHGTLIFGKQGTNANDADLEHVMITDEEEIRTTNPVATEQYGNVSNNLQNSNTGPTTENVNHQGALPGMVWQDRDVYLQGPIWAKIPHTDGHFHPSPLMGGFGLKHPPPQIMIKNTPVPANPPTNFSSAKFASFITQYSTGQVSVEIEWELQKENSKRWNPEIQYTSNYNKSVNVDFTVDTNGVYSEPRPIGTRYLTRNL

SEQ ID NO: 198 - DNA, 2208 bp, Artificial Sequence
  source: /note="Description of Artificial Sequence: Synthetic polynucleotide"
atggctgccgatggttatcttccagattggctcgaggacactctctctgaaggaataagacagtggtggaagctcaaacctggcccaccaccaccaaagcccgcagagcggcataaggacgacagcaggggtcttgtgcttcctgggtacaagtacctcggacccttcaacggactcgacaagggagagccggtcaacgaggcagacgccgcggccctcgagcacgacaaggcctacgaccggcagctcgacagcggagacaacccgtacctcaagtacaaccacgccgacgcggagtttcaggagcgccttaaagaagatacgtcttttgggggcaacctcggacgagcagtcttccaggcaaaaaagagggttcttgaacctctgggcctggttgaggagcctgttaaaacggctccgggaaaaaagaggccggtagagcactctcctgcggagccagactcctcctcgggaaccggaaaagcgggccagcagcctgcaagaaaaagattgaatttcggtcagactggagacgcagactccgtacctgacccccagcctctcggacagccaccagcagccccctctggtctgggaactaatacgatggcttcaggcagtggcgcaccaatggcagacaataacgagggcgccgacggagtgggtaattcctcgggaaattggcattgcgattccacatggatgggcgacagagtcatcaccaccagcacccgaacttgggccctgcccacctacaacaaccatctctacaagcaaatctccagccaatcaggagccagcaacgacaaccactactttggctacagcaccccttgggggtattttgacttcaacagattccactgccacttttcaccacgtgactggcaaagactcatcaacaacaactggggattccggcccaagagactcaacttcaagctctttaacattcaagtcaaagaggtcacgcagaatgacggtacgacgacgattgccaataaccttaccagcacggttcaggtgtttactgactcggagtaccagctcccgtacgtcctcggctcggcgcatcaaggatgcctcccgccgttcccagcagacgtcttcatggtgccacagtatggatacctcaccctgaacaacgggagtcaggcagtaggacgctcttcattttactgcctggagtactttccttctcagatgctgcgtaccggaaacaactttaccttcagctacacctttgaggacgttcctttccacagcagctacgctcacagccagagtttggaccgtctcatgaatcctctcatcgaccagtacctgtattacttgagcagaacaaacactccaagcggaaccaccacgcagtccaggcttcagttttctcaggccggagcaagtgacattcgggaccagtctaggaactggcttcctggaccctgttaccgccagcagcgagtatcaaagacatctgcggataacaacaacagtgaatactcgtggactggagctaccaagtaccacctcaatggcagagactctctggtgaatccgggcccggccatggccagccacaaggacgatgaagaaaagttttttcctcagagcggggttctcatctttgggaagcaaggctcagagaaaacaaatgtggacattgaaaaggtcatgattacagacgaagaggaaatcaggaccaccaatcccgtggctacggagcagtatggttctgtatctaccaacctgcagggcggcaacacacaagcagctaccgcagatgtcaacacacaaggcgttcttccaggcatggtctggcaggacagagacgtgtacctgcaggggcccatctgggcaaagattccacacacggacggacattttcacccctctcccctcatgggcggattcggacttaaacaccctcctccacagattctcatcaagaacaccccggtacctgcgaatccttcgaccaccttcagtgcggcaaagtttgcttctttcatcacacagtattccacggggcaggtcagcgtggagatcgagtgggagctgcagaaggagaacagcaaacgctggaatcccgagatccagtacacttccaactacaacaaatctgttaatgtggactttactgttgacactaatggcgtgtattcagagcctcgccccattggcaccagatacctgactcgtaatctgtaa

SEQ ID NO: 199 - protein, 735 aa, Artificial Sequence
  source: /note="Description of Artificial Sequence: Synthetic polypeptide"
MAADGYLPDWLEDTLSEGIRQWWKLKPGPPPPKPAERHKDDSRGLVLPGYKYLGPFNGLDKGEPVNEADAAALEHDKAYDRQLDSGDNPYLKYNHADAEFQERLKEDTSFGGNLGRAVFQAKKRVLEPLGLVEEPVKTAPGKKRPVEHSPAEPDSSSGTGKAGQQPARKRLNFGQTGDADSVPDPQPLGQPPAAPSGLGTNTMASGSGAPMADNNEGADGVGNSSGNWHCDSTWMGDRVITTSTRTWALPTYNNHLYKQISSQSGASNDNHYFGYSTPWGYFDFNRFHCHFSPRDWQRLINNNWGFRPKRLNFKLFNIQVKEVTQNDGTTTIANNLTSTVQVFTDSEYQLPYVLGSAHQGCLPPFPADVFMVPQYGYLTLNNGSQAVGRSSFYCLEYFPSQMLRTGNNFTFSYTFEDVPFHSSYAHSQSLDRLMNPLIDQYLYYLSRTNTPSGTTTQSRLQFSQAGASDIRDQSRNWLPGPCYRQQRVSKTSADNNNSEYSWTGATKYHLNGRDSLVNPGPAMASHKDDEEKFFPQSGVLIFGKQGSEKTNVDIEKVMITDEEEIRTTNPVATEQYGSVSTNLQGGNTQAATADVNTQGVLPGMVWQDRDVYLQGPIWAKIPHTDGHFHPSPLMGGFGLKHPPPQILIKNTPVPANPSTTFSAAKFASFITQYSTGQVSVEIEWELQKENSKRWNPEIQYTSNYNKSVNVDFTVDTNGVYSEPRPIGTRYLTRNL

SEQ ID NO: 200 - DNA, 3161 bp, Artificial Sequence
  source: /note="Description of Artificial Sequence: Synthetic polynucleotide"
gattgaatttagcggccgcgaattcgcccttgctgcgtcaactggaccaatgagaactttccattcaatgattgcgtcgacaagatggtgatctggtgggaggagggaaagatgaccgccaaggtcatggagtcggccaaagccattctcggaggaagcaaggtgcgcgtggaccagaaatgtaagtcctcggcccagatagacccgactcccgtgattgtcacctccaacaccaacatgtgcgccgtgattgacgggaactcaacgaccttcgagcaccagcagccgttgcaagaccggatgttcaaatttgaactcacccgccgtctggatcatgactttgggaaggtcaccaagcaggaagtcaaagactttttccggtgggcaaaggatcacgtggttgaggtggagcatgaattctacgtcaaaaagggtggagccaagaaaagacccgcccccagtgacgcagatataagtgagcccaaacgggcgcgcgggtcagttgcgcagccatcgacgtcagacgcggaagcttcgatcaactacgcggacaggtaccaaaacaaatgttctcgtcacgtgggcatgaatctgatgctgtttccctgcagacaatgcgagagaatgaatcaaaattcaaatatctgcttcactcacggacagaaggactgtttagagtgctttcccgtgtcagaatctcaacccgtttctgtcgtcaaaaaggcgtatcagaaactttgctacattcatcatatcatgggaaaggtgccagacgcttgcactgcctgcgatctggtcaatgtggatttggatgactgcatctctgaacaataaatgatttaaatcaggtatggctgccgatggttatcttccagattggctcaaggacactctctctgaaggaataagacagtggtggaagctcaaacctggcccaccaccaccaaagcccgcagagcggcataaggacgacagcgggggtcttgtgcttcctgggtacaagtacctcggacccttcaacggactcgacaagggagagccggtcaacgaggcagacgccgcggccctcgagtacgacaaggcctacgaccggcagctcgacagcggagacaacccgtacctcaagtacaaccacgccgacgcggagtttcaggagcgccttaaagaagatacgtcttttgggggcaacctcggacgagcagtcttccaggcgaaaaagagggttcttgaacctctgggcctggttgaggaacctgttaagacggctccgggaaaaaagaggccggtagagcactctcctgtggagccagactcctcctcgggaacaggaaaagcgggccagcagcctgcgagaaagagattgaattttggtcagactggagacgcagactccgtacctgacccccagcctctcggacagccaccagcagccccctctggtctgggaactaatacgatggctacaggcagtggcgcaccaatggcagacaataacgagggcgccgacggagtgggtaattcctcgggaagttggcattgcgattccacatggatgggcgacagagtcatcaccaccagcacccgaacctgggctctgcccacctacaacaaccatctgtacaagcagatctccagccaatcaggagccagcaacgacaaccactactttggctacagcaccccttgggggtattttgacttcaacagattccactgccacttttcaccacgtgactggcaaagactcatcaacaacaactggggattccggcccaagagactcaacttcaagctctttaacattcaagtcaaggaggtcacgcagaatgacggtacgacgacgattgccaataaccttaccagcacggttcaggtgtttactgactcggagtaccagctcccgtacgtccccggctcggcgcatcaaggatgcctcccgccgttcccagcagacgtcttcatggtgccacagtatggatacctcaccctgaacaacgggagtcaggcagtaggacgctcttcattttactgcctggagtactttccttctcagatgcttcgtaccggaaacaactttaccttcagctacacctttgaggatgttcctttccacagcagctacgctcacagccagagtttggaccgtctcatgaatcctctcatcgaccagtacctgtattacttgagcagaacaaacactccaagcggaaccaccacgcagtccaggcttcagttttctcaggccggagcaagtgacattcgggaccagtctaggaactggcttcctggaccctgttaccgccagcagcgagtatcaaagacagctgcggacaacaacaacagtgaatactcgtggactggagctaccaagtaccacctcaatggcagagactctctggtgaatccgggcccggccatggccagccacaaggacgatgaagaaaagttttttcctcaaagcggggttctcatctttgggaagcaaggctcagagaaaacaaatgtggacattgaaaaggtcatgattacagacgaagaggaaatcagaaccaccaatcccgtggccacggagcagtatggttctgtatctaccaacctccagagcggcaacacacaagcagctactgcagatgtcaacacacaaggcgttcttccaggcatggtctggcaggacagagacgtgcacctgcaggggcctatctgggcaaagattccacacacggacggacattttcacccctctcccctcatgggcggatttggacttaaacaccctcctccacagattctcatcaagaacaccccggtacctgcaaatccttcgaccaccttcagtgcggcaaagtttgcttccttcatcacacagtattccacagggcaggtcagcgtggagatcgagtgggagctgcagaaggagaacagcaaacgctggaaccccgagatccagtacacttccaactacaacaaatctgttaatgtggactttactgtggacactaatggtgtgtattcagagcctcgccccattggcaccagatacctgactcgtaatctgtaattgcttgttaatcaataaaccgtttaattcgtttcagttgaactttggtctctgcgaagggcgaattcgtttaaaccctgcaggactagtccctttagtgagg

SEQ ID NO: 201 - DNA, 3162 bp, Artificial Sequence
  source: /note="Description of Artificial Sequence: Synthetic polynucleotide"
gaattgaatttagcggccgcgaattcgcccttcgcagagaccaaagttcaactgaaacgaattaaacggtttattgattaacaagcaattacagattacgagtcaggtatctggtgccaatggggcgaggctctgaatacacgccattagtgtccacagtaaagtccacattaacagacttgttgtagttggaagtgtactgaatttcgggattccagcgtttgctgttttccttctgcagctcccactcgatctccacgctgacctgtcccgtggagtactgtgtgatgaaggaagcaaactttgccgcactgaaggtggtcgaaggattcgcaggtaccggggtgttcttgatgagaatctgtggaggagggtgtttaagtccgaatccacccatgaggggagaggggtgaaaatgtccgtccgtgtgtggaatctttgcccagatgggcccctgaaggtacacatctctgtcctgccagaccatgcctggaagaacgccttgtgtgttgacatctgcggtagctgcttgtctgttgcctctctggaggttggtagatacagaaccgtactgctccgtagccacgggattggttgtcctgatttcctcttcgtctgtaatcatgaccttttcaatgtccacatttgttttctctgagccttgcttcccaaagatgagaaccccgctctgaggaaaaaacttttcttcattgtccttgtggcttgccatggccgggcccggattcaccagagagtctctgccattgaggtggtacttggtagctccagtccacgagtattcactgttgttgttatccgcagatgtctttgatactcgctgctggcggtaacagggtccaggaagccagttcctagactggtcccgaatgtcactcgctccggcctgagaaaactgaagccttgactgcgtggtggttccacttggagtgtttgttgtgctcaagtaatacaggtactggtcgatgagaggattcatgagacggtccagactctggctgtgagcgtagccgctgtggaaaggaacgtcctcaaaagtgtagctgaaggtaaagttgtttccggtacgcagcatctgagaaggaaagtactccaggcagtaaaatgaagagcgtcctactgcctgactcccgttgttcagggtgaggtatccatactgtggcaccatgaagacgtctgctgggaacggcgggaggcatccttgatgcgccgagccgaggacgtacgggagctggtactccgagtcagtaaacacctgaaccgtgctggtaaggttattggcaatcgtcgtcgtaccgtcattctgcgtgacctctttgacttgaatgttaaagagcttgaagttgagtctcttgggtcggaatccccagttgttgttgatgagtctttgccagtcacgtggtgaaaagtggcagtggaatctgttgaagtcaaaatacccccaaggggtgctgtagccaaagtagtgattgtcgttcgaggctcctgattggctggaaatttgtttgtagaggtggttgttgtaggtgggcagggcccaggttcgggtgctggtggtgatgactctgtcgcccatccatgtggaatcgcaatgccaatttcccgaggaattacccactccgtcggcgccctcgttattgtctgccattggtgcgccactgcctgtagccatcgtattagttcccagaccagagggggctgctggtggctgtccgagaggctgggggtcaggtactgagtctgcgtctccagtctgaccaaaattcaatctttttcttgcaggctgctggcccgcctttccggttcccgaggaggagtctggctccacaggagagtgctctaccggcctcttttttcctggagccgtcttgacaggttccccaaccaggcccagaggttcaagaaccctctttttcgcctggaagactgctcgtccgaggttgcccccaaaagacgtatcttctttaaggcgctcctgaaactccgcgtcggcgtggttgtacttgaggtacgggttgtctccgctgtcgagctgccggtcgtaggctttgtcgtgctcgagggccgcggcgtctgcctcgttgaccggctctcccttgtcgagtccgttgaagggtccgaggtacttgtacccaggaagcacaagacccctgctgtcgtccttatgccgctctgcgggctttggtggtggtgggccaggtttgagcttccaccactgtcttattccttcagagagagtgtcctcgagccaatctggaagataaccatcggcagccatacctgatttaaatcatttattgttcaaagatgcagtcatccaaatccacattgaccagatcgcaggcagtgcaagcgtctggcacctttcccatgatatgatgaatgtagcacagtttctgatacgcctttttgacgacagaaacgggttgagattctgacacgggaaagcactctaaacagtctttctgtccgtgagtgaagcagatatttgaattctgattcattctctcgcattgtctgcagggaaacagcatcagattcatgcccacgtgacgagaacatttgttttggtacctgtctgcgtagttgatcgaagcttccgcgtctgacgtcgatggctgcgcaactgactcgcgcacccgtttgggctcacttatatctgcgtcactgggggcgggtcttttcttggctccaccctttttgacgtagaattcatgctccacctcaaccacgtgatcctttgcccaccggaaaaagtctttgacttcctgcttggtgaccttcccaaagtcatgatccagacggcgggtgagttcaaatttgaacatccggtcttgcaacggctgctggtgttcgaaggtcgttgagttcccgtcaatcacggcgcacatgttggtgttggaggtgacgatcacgggagtcgggtctatctgggccgaggacttgcatttctggtccacgcgcaccttgcttcctccgagaatggctttggccgactccacgaccttggcggtcatcttcccctcctcccaccagatcaccatcttgtcgacacagtcgttgaagggaaagttctcattggtccagttgacgcagcaagggcgaattcgtttaaacctgcaggactagtccctttagtgaggg

SEQ ID NO: 202 - DNA, 3164 bp, Artificial Sequence
  source: /note="Description of Artificial Sequence: Synthetic polynucleotide"
gcgaattgaatttagcggccgcgaattcgcccttcgcagagaccaaagttcaactgaaacgaattaaacggtttattgattaacaagcaattacaaattacgagtcaggtatctggtgccaatggggcgaggctctgaatacacgccattagtgtccacagtaaagtccacattaacagacttgttgtagttggaagtgtactgaatttcgggattccagcgtttgctgttttccttctgcagctcccactcgatctccacgctgacctgtcccgtggagtactgtgtgatgaaggaagcaaactttgccgcactgaaggtggtcgaaggattcgcaggtaccggggtgttcttgatgagaatctgtggaggagggtgtttaggtccgaatccacccatgaggggagaggggtgaaaatgtccgtccgtgtgtggaatctttgcccagatgggcccctgaaggtacacatctctgtcctgccagaccatgcctggaagaacgccttgtgtgttgacatctgcggtagctgcttgtctgttgcctctctggaggttggtagatacagaaccatactgctccgtagccacgggattggttgtcctgatttcctcttcgtctgtaatcatgaccttttcaatgtccacatttgttttctctgagccttgcttcccaaagatgagaaccccgctctgaggaaaaaacttttcttcattgtccttgtggcttgccatggccgggcccggattcaccagagagtctctgccattgaggtggtacttggtagctccagtccacgagtattcactgttgttgttatccgcagatgtctttgatactcgctgctggcggtaacagggtccaggaagccagttcctagactggtcccgaatgtcactcgctccggcctgagaaaactgaagccttgactgcgtggtggttccacttggagtgtttgttgtgctcaagtaatacaggtactggtcgatgagaggattcatgagacggtccagactctggctgtgagcgtagctgctgtggaaaggaacgtcctcaaaagtgtagctgaaggtaaagttgtttccggtacgcagcatctgagaaggaaagtactccgggcagtaaaatgaagagcgtcctactgcctgactcccgttgctcagggtgaggtatccatactgtggcaccatgaagacgtctgctgggaacggcgggaggcatccttgatgcgccgagccgaggacgtacgggagctggtactccgagtcagtaaacacctgaaccgtgctggtaaggttattggcaatcgtcgtcgtaccgtcattctgcgtgacctctttgacttgaatgttaaagagcttgaagttgagtctcttgggtcggaatccccagttgttgttgatgagtctttgccagtcacgtggtgaaaagtggcagtggaatctgttgaagtcaaaatacccccaaggggtgctgtagccaaagtagtgattgtcgttcgaggctcctgattggctggaaatttgtctgtagaggtggttgttgtaggtgggcagggcccaggttcgggtgctggtggtgatgactctgtcgcccatccatgtggaatcgcaatgccgatttcccgaggaattacccactccgtcggcgccctcgttattgtctgccattggtgcgccactgcctgtagccatcgtattagttcccagaccagagggggctgctggtggctgtccgagaggctgggggtcaggtactgagtctgcgtctccagtctgaccaaaattcaatctttttcttgcaggctgctggcccgcctttccggttcccgaggaggagtctggctccacaggagagtgctctaccggcctcttttttcccggagccgtcttaacaggttccccaaccaggcccagaggttcaagaaccctctttttcgcctggaagactgctcgtccgaggttgcccccaaaagacgtatcttctttaaggcgctcctgaaactccgcgtcggcgtggttgtacttgaggtacgggttgtctccgctgtcgagctgccggtcgtaggctttgtcgtgctcgagggccgcggcgtctgcctcgttgaccggctctcccttgtcgagtccgttgaagggtccgaggtacttgtacccaggaagcacaagacccctgctgtcgtccttatgccgctctgcgggctttggtggtggtgggccaggtttgagcttccaccactgtcttattccttcagagagagtgtcctcgagccaatctggaagataaccatcggcagccatacctgatttaaatcatttattgttcaaagatgcagtcatccaaatccacattgaccagatcgcaggcagtgcaagcgtctggcacctttcccatgatatgatgaatgtagcacagtttctgatacgcctttttgacgacagaaacgggttgagattctgacacgggaaagcactctaaacagtctttctgtccgtgagtgaagcagatatttgaattctgattcattctctcgcattgtctgcagggaaacagcatcagattcatgcccacgtgacgagaacatttgttttggtacctgtctgcgtagttgatcgaagcttccgcgtctgacgtcgatggctgcgcaactgactcgcgcacccgtttgggcccacttatatctgcgtcactgggggcgggtcttttcttggctccaccctttttgacgtagaattcatgctccacctcaaccacgtgatcctttgcccaccggaaaaagtctttgacttcctgcttggtgaccttcccaaagtcatgatccagacggcgggtgagttcaaatttgaacatccggtcttgcaacggctgctggtgttcgaaggtcgttgagttcccgtcaatcacggcgcacatgttggtgttggaggtgacgatcacgggagtcgggtctatctgggccgaggacttgcatttctggtccacgcgcaccttgcttcctccgagaatggctttggccgactccacgaccttggcggtcatcttcccctcctcccaccagatcaccatcttgtcgacacagtcgttgaagggaaagttctcattggtccagttgacgcagcaagggcgaattcgtttaaacctgcaggactagtccctttagtgaggg

SEQ ID NO: 203 - DNA, 3163 bp, Artificial Sequence
  source: /note="Description of Artificial Sequence: Synthetic polynucleotide"
accctcactaaagggactagtcctgcaggtttaaacgaattcgcccttgctgcgtcaactggagcaatgagaactttcccttcaacgactgtgtcgacaagatggtgatttggtgggaggaggggaagatgaccgccaaggtcgtggagtcggccaaagccattctcggaggaagcaaggtgcgcgtggaccagaaatgcaagtcctcggcccagatagatccgactcccgtgatcgtcacctccaacaccaacatgtgcgccgtgattgacgggaactcaacgaccttcgaacaccagcagccgttgcaagaccggatgttcaaatttgaactcacccgccgtctggatcatgactttgggaaggtcaccaagcaggaagtcaaagactttttccggtgggcaaaggatcacgtggttgaggtggagcatggattctacgtcaaaaagggtggagccaagaaaagacccgcccctagtgacgcagatataagtgagcccaaacgggtgcgcgagtcagttgcgcagccatcgacgtcggacgcggaagcttcgatcaactacgcggacaggtaccaaaacaaatgttctcgtcacgtgggcatgaatctgatgctgtttccctgcagacaatgcgagagaatgaatcaaaattcaaatatctgcttcactcacggacagaaagactgtttagagtgctttcccgtgtcagaatctcaacctgtttctgtcgtcaaaaaggcgtatcagaaactgcgctacattcatcatatcatgggaaaggtgccagacgcttgcactgcctgcgatctggtcaatgtggatttggatgactgcatctctgaacaataaatgatttaaatcaggtatggctgccgatggttatcttccagattggctcgaggacactctctctgaaggaataagacagtggtggaagctcaaacctggcccaccaccaccaaagcccgcagagcggcataaggacgacagcaggggtcttgtgcttcctgggtacaagtacctcggacccttcaacggactcgacaagggagagccggtcaacgaggcagacgccgcggccctcgagcacgacaaggcctacgaccggcagctcgacagcggagacaacccgtacctcaagtacaaccacgccgacgcggagtttcaggagcgtcttaaagaagatacgtcttttgggggcaacctcggacgagcagtcttccaggcgaaaaagagggttcttgaacctctgggcctggttgaggaacctgttaagacggctccgggaaaaaagaggccggtagagcactctcctgcggagccagactcctcctcgggaaccggaaaagcgggccagcagcctgcaagaaaaagactgaatttcggtcagactggagacgcagactccgtacctgacccccagcctctcggacagccaccagcagcccccacaagtttgggatctactacaatggctacaggcagtggcgcaccaatggcagacaataacgagggtgccgatggagtgggtaattcctcaggaaattggcattgcgattcccaatggctgggcgacagagtcatcaccaccagcacccgaacctgggccctgcccacctacaacaaccacctttacaagcaaatctccagccaatcaggagcctcaaacgacaaccactactttggctacagcaccccctgggggtattttgacttcaacagattccactgccacttttcaccacgtgactggcaaagactcatcaacaacaactggggattccgacccaagagactcaacttcaagctctttaacattcaagtcaaagaggtcacgcagaatgacggtacgacgacgattgccaataaccttaccagcacggttcaggtgtttactgactcggagtaccagctcccgtacgtcctcggctcggcgcatcaaggatgcctcccgccgtttccagcggacgtcttcatggtcccacagtatggatacctcaccctgaacaacgggagtcaggcggtaggacgctcttccttttactgcctggagtgctttccttctcagatgctgcgtactggaaacaactttcagttcagctacacttttgaagacgtgcctttccacagcagctacgctcacagccagagtttggatcggctgatgaatcctctgatcgaccagtacctgtattatctaaacagaacacaaacagctagtggaactcagcagtctcggctactgtttagccaagctggacccacaagcatgtctcttcaagctaaaaactggctgcctggaccgtgttatcgccagcagcgtttgtcaaagcaggcaaacgacaacaacaacagcaactttccctggactggagctaccaagtaccacctcaatggcagagactctttggtgaacccgggcccggccatggccagccacaaggacgatgaagaaaagtttttccccatgcatggaaccctaatatttggtaaagaaggaacaaatgctaccaacgcggaattggaaaatgtcatgattacagatgaagaggaaatcaggaccaccaatcccgtggctacagagcagtacggatatgtgtcaaataatttgcaaaactcaaatactgctgcaagtactgaaactgtgaatcaccaaggagcattacctggtatggtgtggcaggatcgagacgtgtacctgcagggacccatttgggccaagattcctcacaccgatggacactttcatccttctccactgatgggaggttttggactcaaacacccgcctcctcagattatgatcaaaaacactcccgttccagccaatcctcccacaaacttcagttctgccaagtttgcttccttcatcacacagtattccacgggacaggtcagcgtggagatcgagtgggagctgcagaaggagaacagcaaacgctggaatcccgaaattcagtacacttccaactacaacaaatctgttaatgtggactttactgtggacactaatggtgtgtattcagagcctcgccccattggcaccagatacctgactcgtaatctgtaattgcttgttaatcaataaaccgtttaattcgtttcagttgaactttggtctctgcgaagggcgaattcgcggccgctaaattcaattcgcc

SEQ ID NO: 204 - protein, 735 aa, Artificial Sequence
  source: /note="Description of Artificial Sequence: Synthetic polypeptide"
MAADGYLPDWLEDTLSEGIRQWWKLKPGPPPPKPAERHKDDSRGLVLPGYKYLGPFNGLYKGEPVDEADAAALEHDKAYDRQLDSGDNPYLKYNHADAEFQERLKEDTSFGGNLGRAVFQAKKRVLEPLGLVGEPVKTAPGKKRPVEHSPVEPDSSSGTGKAGNQPARKRLNFGQTGDADSVPDPQPLGQPPAAPSGLGSTTMATGSGAPVADNNEGADGVGNSSGNWHCDSQWLGDRVITTSTRTWALPTYNNHLYKQISSQSGASNDNHYFGYSTPWGYFDFNRFHCHFSPRDRQRLINNNWGFRPKRLNFKLFNIQVKEVTQNDGTTTIANNLTSTVQVFTDSGYQLPYVLGLAHQGCLPPFPADVFMVPQYGYLTLNNGSQAVGRSSFYCLEYFPSQMLRTGNNFQFSYTFEDVPFHSSYAHSQSLDRLMNPLIDQYLYYLNKTQSNSGTLQQSRLLFSQAGPTSMSLQAKNWLPGPCYRQQRLSKQANDNNNSNFPWTAATKYHLNGRDSLVNPGPAMASHKDDEEKFFPMHGTLIFGKQGTNANDADLDNVMITDEEEIRTTNPVATEQYGYVSNNLQNSNTGPTTGTVNHQGALPGMVWQDRDVYLQGPIWAKIPHTDGHFHPSPLMGGFGLKHPPPQIMIKNTPVPANPPTNFSSAKFASFITQYSTGQVSVEIEWELQKEDSKRWNPEIQYTSNYNKPVNVDFTVDTNGVYSEPRPIGTRYLTRNL

SEQ ID NO: 205 - DNA, 2208 bp, Artificial Sequence
  source: /note="Description of Artificial Sequence: Synthetic polynucleotide"
atggctgccgatggttatcttccagattggctcgaggacactctctctgaaggaataagacagtggtggaagctcaaacctggcccaccaccaccaaagcccgcagagcggcataaggacgacagcaggggtcttgtgcttcctgggtacaagtacctcggacccttcaacggactctacaagggagagccggtcgacgaggcagacgccgcggccctcgagcacgacaaggcctacgaccggcagctcgacagcggagacaacccgtacctcaagtacaaccacgccgacgcggagtttcaggagcgccttaaagaagatacgtcttttgggggcaacctcggacgagcagtcttccaggccaaaaagagggttcttgaacctctgggcttggttggggagcctgttaaaacggctccgggaaaaaagaggccggtagagcactctcctgtggagccagactcctcctcgggaaccggaaaagcgggcaaccagcctgcaagaaaaagattgaattttggtcagactggagacgcagactccgtacctgacccccagcctctcggacagccaccagcagccccctctggtctgggatctactacaatggctacaggcagtggcgcaccagtggcagacaataacgagggtgccgatggagtgggtaattcctcaggaaattggcattgcgattcccaatggctgggcgacagagtcatcaccaccagcacccgaacctgggctctgcccacctacaataaccacctctacaagcaaatctccagccaatcaggagcctcaaacgacaaccactactttggctacagcaccccctgggggtattttgacttcaacagattccactgccacttttcaccacgtgaccggcaaagactcatcaacaacaactggggattccgaccaaaaagactcaacttcaagctctttaacattcaagtcaaagaggtcacgcagaatgacggtacgacgacgattgccaataaccttaccagcacggttcaggtgtttactgactcggggtaccagctcccgtacgtcctcggcttggcgcatcaaggatgcctcccgccgttcccagcagacgtcttcatggtgccacagtatggatacctcaccctgaacaacgggagtcaggcggtaggacgctcttccttttactgcctggagtactttccttctcagatgctgcgtactggaaacaactttcagttcagctacacctttgaagacgttcctttccacagcagctacgctcacagccagagtctggatcggctgatgaatcctctgatcgaccagtacctgtattatctgaacaagacacaatcaaatagtggaactcttcagcagtctcggctactgtttagccaagctggacccaccagcatgtctcttcaagctaaaaactggctgcctggaccttgctacagacagcagcgtctgtcaaagcaggcaaacgacaacaacaacagcaactttccctggactgcggctacaaagtatcatctaaatggccgggactcgttggttaatccaggaccagctatggccagccacaaagacgatgaagaaaagtttttccccatgcatggaaccctgatatttggtaaacaaggaacaaatgctaacgacgcggatttggacaatgtcatgattacagatgaagaagaaatccgcaccaccaatcccgtggctacggagcagtacggatatgtgtcaaataatttgcaaaactcaaatactggtccaactactggaactgtcaatcaccaaggagcgttacctggtatggtgtggcaggatcgagacgtgtacctgcagggacccatttgggccaagattcctcacaccgatggacactttcatccttctccacttatgggaggttttggactcaaacacccacctcctcagatcatgattaaaaacactcccgttccagccaatcctcccacaaacttcagttctgccaagtttgcttctttcatcacacagtattccacgggacaagtcagcgtggagatcgagtgggagctgcagaaggaggacagcaaacgctggaaccccgagatccagtacacttccaactataacaaacctgttaatgtggactttactgtggacactaatggtgtgtattcagagcctcgccccattggcaccagatacctgactcgtaatctgtaa

SEQ ID NO: 206 - DNA, 3161 bp, Artificial Sequence
  source: /note="Description of Artificial Sequence: Synthetic polynucleotide"
cgaattgatttagcggccgcgaattcgcccttcgcagagaccaaagttcaactgaaacgaattaaacggtttattgattaacaagcaattacagattacgagtcaggtatctggtgccaatggggcgaggctctgaatacacaccattagtgtccacagtaaagtccacattaacagatttgttgtagttggaagtgtactggatctcgggattccagcgtttgctgttctccttctgtagctcccactcgatctccacgctgacccgccccgtggaatactgtgtgatgaaggaagcaaactttgccgcactgaaggtggtcgaaggattcgcaggtaccggggtgtttttgatgagaatctgtggaggagggtgtttaagtccgaatccgcccatgaggggagaggggtgaaaatgtccgtccgtgtgcggaatctttgcccagataggcccctgcaggtacacgtctctgtcctgccagaccatgcctggaagaacgccttgtgtgttgacatctgcagtagatgcttgtgtgttgccgctctggaggttggtagatacagaaccatactgctccgtggccacgggattggtggttctgatttcctcttcgtctgtaatcatgaccttttcaatgtccacatttgttttctctgatccttgttttccaaagatgagaaccccgctctgaggaaaaaacttttcttcatcgtccttgtggctggccattgccgggcccggattcaccagagagtctctgccattgaggtggtacttggtagctccaatccacgagtattcactgttgttgttgtccgcagatgtctttgatactcgctgctggcggtaacagggtccaggaagccagttcctagactgatcccgaatgtcactcgctccggcctgagaaaactgaagcctggactgcgtggtggttccgcttggagtgtttgttctgctcaagtaatacaggtactggtcgatgagaggattcatgagacggtccaaactctggctgtgagcgtagctgctgtggaaaggaacatcctcaaaggtgtagctgaaggtaaagttgtttccggtacgcagcatctgagaagggaagtactccaggcagtaaaatgaagagcgtcctactgcctgactcccgttgttcagggtgaggtatccatactgtggcaccatgaagacgtctgctgggaacggcgggaggcatccttgatgcgccgagccgaggacgtacgggagctggtactccgagtcagtaaacacctgaaccgtgctggtaaggttattggcaatcgtcgtcgtaccatcattctgcgtgacctctctgacttgaatgttaaagagcttgaagttgagtctcttgggccggaatccccagttgttgttgatgagtctttgccagtcacgtggtgaaaagtggcagtggaatctgttgaagtcaaaatacccccaaggggtgctgtagccaaagtagtggttgtcgttgctggctcctgattggctggaaatctgcttgtacagatggttgttgtaggtgggcagagcccaggttcgggtgctggtggtgatgactctgtcgcccatccatgtggaatcgcaatgccaatttcccgaggaattacccactccgtcggcgccatcgttattgtctgccattggtgcgccactgcctgtagccatcgtattagttcccagaccagagggggctgctggtggctgtccgagaggctgggggtcaggtacggagtctgcgtctccagtctgaccgaaattcaatctctttcttgcaggctggttgcccgcttttccggttcccgaggaggagtctggctccacaggagagtgctctaccggcctcttttttcccggagccgtcttaacaggctcctcaaccaggcccagaggttcaagaaccctcttttttgcctggaagactgctcgtccgaggttgcccccaaaagacgtatcttctttaaggcgctcctgaaactccgcgtcggcgtggtcgtacttgaggtacgggttgtctccgctgtcgagctgccggtcgtaggccttgtcgtgctcgagggccgcggcgtctgcctcgttgaccggctctcccttgtcgagtccgttgaagggtccgaggtacttgtacccaggaagcacaagacccctgctgtcgtccttatgccgctctgcgggctttggtggtggtgggccaggtttgagcttccaccactgtcttattccttcagagagagtgtcctcgagccaatctggaagataaccatcggcagccatacctgatttaaatcatttattgttcagagatgcagtcatccaaatccacattgaccagatcgcaggcagtgcaagcgtctggcacctttcccatgatatgatgaatgtagcaaagtttctgatacgcctttttgacgacagaaacgggttgagattctgacacgggaaagcactctaaacagtctttctgtccgtgagtgaagcagatatttgaattctgattcattctctcgcattgtctgcagggaaacagcatcagattcatgcccacgtgacgagaacatttgttttggtacctgtccgcgtagttgatcgaagcttccgcgtctgacgtcgatggctgcgcaactgactcgcgcgcccgtttgggctcacttatatctgcgtcactgggggcgggtcttttcttggctccaccctttttgacgtagaattcatgctccacctcaaccacgtgatcctttgcccaccggaaaaagtctttcacttcctgcttggtgaccttcccaaagtcatgatccagacggcgggttagttcaaatttgaacatccggtcttgcaacggctgctggtgttcgaaggtcgttgagttcccgtcaatcacggcgcacatgttggtgttggaggtggcgatcacgggagtcgggtctatctgggccgaggacttgcacttttggtccacgcgcaccttgcttcctccgagaatggcttcggccgattccacgaccttggcggtcatctttccctcctcccaccagatcaccatcttgtcgacacagtcgttgaagggaaagttctcattggtccagttgacgcagcaagggcgaattcgtttaaacctgcaggaactagtcccttagtgagg

SEQ ID NO: 207 - protein, 735 aa, Artificial Sequence
  source: /note="Description of Artificial Sequence: Synthetic polypeptide"
MAADGYLPDWLEDTLSEGIRQWWKLKPGPPPPKPAERHKDDSRGLVLPGYKYLGPFNGLYKGEPVNEADAAALEHDKAYDRQLDSGDNPYLKYNHAGAEFQERLKEDTSFGGNLGRAVFQAKKRVLEPLGLVEEPVKTAPGKKRPVEHSPVEPDSSSGTGKAGNQPARKRLNFGQTGDADSVPDPQPLGQPPAAPSGLGSTTMATGSGAPVADNNEGADGVGNSSGNWHCDSQWLGDRVITTSTRTWALPTYNNHLYKQISSQSGASNDNHYFGYSTPWGYFDFNRFHCHFSPRDWQRLINNNWGFRPKRLNFKLFNIQVKEVTQNDGTTTIANNLTSTVQVFTDSEYQLPYVLGSAHQGCLPPFPADVFMVPQYGYLTLNNGSQAVGRSSFYCLEYFPSQMLRTGNNFQFSYTFEDVPFHSSYAHSQSLDRLMNPLIDQYLYYLNKTQSNSGTLQQSRLLFSQAGPTSMSLQAKNWLPGPCYRQQRLSKQANDNNNSNFPWTAATKYHLNGRDSLVNPGPAMASHKDDEEKFFPMHGTLIFGKQGTNANDADLDNVMITDEEEIRTTNPVATEQYGYVSNNLQDSNTGPTTGTVNHQGALPGMVWQDRDVYLQGPIWAKIPHTDGHFHPSPLMGGFGLKHPPPQIMIKNTPVPANPPTNFSSAKFASFITQYSTGQVSVEIEWELQKENSKRWNPEIQYTSNYNKSVNVDFTVDTNGVYSEPRPIGTRYLTRNL

SEQ ID NO: 208 - DNA, 2208 bp, Artificial Sequence
  source: /note="Description of Artificial Sequence: Synthetic polynucleotide"
atggctgccgatggttatcttccagattggctcgaggacactctctctgaaggaataagacagtggtggaagctcaaacctggcccaccaccgccaaagcccgcagagcggcataaggacgacagcaggggtcttgtgcttcctgggtacaagtacctcggacccttcaacggactctacaagggagagccggtcaacgaggcagacgccgcggccctcgagcacgacaaggcctacgaccggcagctcgacagcggagacaacccgtacctcaagtacaaccacgccggcgcggagtttcaggagcgccttaaagaagatacgtcttttgggggcaacctcggacgagcagtcttccaggccaaaaagagggttcttgaacctctgggcttggttgaggagcctgttaaaacggctccgggaaaaaagaggccggtagagcactctcctgtggagccagactcctcctcgggaaccggaaaagcgggcaaccagcctgcaagaaaaagattgaattttggtcagactggagacgcagactccgtacctgacccccagcctctcggacagccaccagcagccccctctggtctgggatctactacaatggctacaggcagtggcgcaccagtggcagacaataacgagggtgccgatggagtgggtaattcctcaggaaattggcattgcgattcccaatggctgggcgacagagtcatcaccaccagcacccgaacctgggctctgcccacctacaacaaccacctctacaagcaaatctccagccaatcaggagcctcaaacgacaaccactactttggctacagcaccccctgggggtattttgacttcaacagattccactgccacttttcaccacgtgactggcaaagactcatcaacaacaactggggattccgaccaaagagactcaacttcaagctctttaacattcaagtcaaagaggtcacgcagaatgacggtacgacgacgattgccaataaccttaccagcacggttcaggtgtttactgactcggagtaccagctcccgtacgtcctcggctcggcgcatcaaggatgcctcccgccgttcccagcagacgtcttcatggtgccacagtatggatacctcaccctgaacaacgggagtcaggcggtaggacgctcttccttttactgcctggagtactttccttctcagatgctgcgtactggaaacaactttcagttcagctacacctttgaagacgttcctttccacagcagctacgctcacagccagagtctggatcggctgatgaatcctctgatcgaccagtacctgtattatctgaacaagacacaatcaaatagtggaacccttcagcagtctcggctactgtttagccaagctggacccaccagcatgtctcttcaagctaaaaactggctgcctggaccttgctacagacagcagcgtctgtcaaagcaggcaaacgacaacaacaacagcaactttccctggactgcggctacaaagtatcatctaaatggccgggactcgttggttaatccaggaccagctatggccagccacaaagacgatgaagaaaagtttttccccatgcatggaaccctgatatttggtaaacaaggaacaaatgctaacgacgcggatttggacaatgtcatgattacagatgaagaagaaatccgcaccaccaatcccgtggctacggagcagtacggatatgtgtcaaataatttgcaagactcaaatactggtccaactactggaactgtcaatcaccaaggagcgttacctggtatggtgtggcaggatcgagacgtgtacctgcagggacccatttgggccaagattcctcacaccgatggacactttcatccttctccacttatgggaggttttggactcaaacacccacctcctcagatcatgattaaaaacactcccgttccagccaatcctcccacaaacttcagttctgccaagtttgcttctttcatcacacagtattccacgggacaagtcagcgtagagatcgagtgggagctgcagaaggagaacagcaaacgctggaaccccgagatccagtacacttccaactataacaaatctgttaatgtggactttactgtggacactaatggtgtgtattcagagcctcgccccattggcaccagatacctgactcgtaatctgtaa

SEQ ID NO: 209 - protein, 738 aa, Artificial Sequence
  source: /note="Description of Artificial Sequence: Synthetic polypeptide"
MAADGYLPDWLEDNLSEGIREWWDLKPGAPKPKANQQKQDDGRGLVLPGCKYLGPFNGLDKGEPVNAADAAALEHDKAYDQQLKAGDNPYLRYNHADAEFQERLQEDTSFGGNLGRAVFQAKKRVLEPLGLVEEGAKTAPGKKRPVEPSPQRSPDSSTGIGKTGQQPAKKRLNFGQTGDSESVPDPQPIGEPPAGPSGLGSGTMAAGGGAPMADNNEGADGVGSSSGNWHCDSTWLGDRVITTSTRTWALPTYNNHLYKQISNGTSGGSTNDNTYFGYSTPWGYFDFNRFHCHFSPRDWQRLINNNWGFRPKRLNFKLFNIQVKEVTQNEGTKTIANNLTSTIQVFTDSEYQLPYVLGSAHQGCPPPFPADVFMIPQYGYLTLNNGSQAVGRSSFYCLEYFPSQMRRTGNNFEFSYQFEDVPFHSSYAHSQSLDRLMNPLIDQYLYYLSRTQSTGGTAGTQQLLFSQAGPNNMSAQAKNWLPGPCYRQQRVSTTLSQNNNSNFAWTGATKYHLNGRDSLVNPGVAMATHKDDEERFFPSSGVLMFGKQGAGKDNVDYSSVMLTSEEEIKTTNPVATEQYGVVADNLQQQNAAPIVGAVNSQGALPGMVWQNRDVYLQGPIWAKIPHTDGNFHPSPLMGGFGLKHPPPQILIKNTPVPADPPTTFSQAKLASFITQYSTGQVSVEIEWELQKENSKRWNPEIQYTSNYNKSVNVDFTVDTNGVYSEPRPIGTRYLTRNL

SEQ ID NO: 210 - DNA, 2217 bp, Artificial Sequence
  source: /note="Description of Artificial Sequence: Synthetic polynucleotide"
atggctgccgatggttatcttccagattggctcgaggacaacctctctgagggcattcgcgagtggtgggacttgaaacctggagccccgaaacccaaagccaaccagcaaaagcaggacgacggccggggtctggtgcttcctggctgcaagtacctcggacccttcaacggactcgacaagggggagcccgtcaacgcggcggacgcagcggccctcgagcacgacaaggcctacgaccagcagctcaaagcgggtgacaatccgtacctgcggtataaccacgccgacgccgagtttcaggagcgtctgcaagaagatacgtcttttgggggcaacctcgggcgagcagtcttccaggccaagaagcgggttctcgaacctctcggtctggttgaggaaggcgctaagacggctcctggaaagaagagaccggtagagccatcaccccagcgttctccagactcctctacgggcatcggcaagacaggccagcagcccgcgaaaaagagactcaactttgggcagactggcgactcagagtcagtgcccgaccctcaaccaatcggagaaccccccgcaggcccctctggtctgggatctggtacaatggctgcaggcggtggcgctccaatggcagacaataacgaaggcgccgacggagtgggtagttcctcaggaaattggcattgcgattccacatggctgggcgacagagtcatcaccaccagcacccgaacctgggccctccccacctacaacaaccacctctacaagcaaatctccaacgggacatcgggaggaagcaccaacgacaacacctacttcggctacagcaccccctgggggtattttgactttaacagattccactgccacttctcaccacgtgactggcagcgactcatcaacaacaactggggattccggcccaagagactcaacttcaagctcttcaacatccaggtcaaggaggtcacgcagaatgaaggcaccaagaccatcgccaataaccttaccagcacgattcaggtctttacggactcggaataccagctcccgtacgtcctcggctctgcgcaccagggctgcccgcctccgttcccggcggacgtcttcatgattcctcagtacgggtacctgactctgaacaacggcagtcaggccgtgggccgttcctccttctactgcctggagtactttccttctcaaatgcggagaacgggcaacaactttgagttcagctaccagtttgaggacgtgccttttcacagcagctacgcgcatagccaaagcctggaccggctgatgaaccccctcatcgaccagtacctgtactacctgtctcggactcagtccacgggaggtaccgcaggaactcagcagttgctattttctcaggccgggcctaataacatgtcggctcaggccaaaaactggctacccgggccctgctaccggcagcaacgcgtctccacgacactgtcgcaaaataacaacagcaactttgcttggaccggtgccaccaagtatcatctgaatggcagagactctctggtaaatcccggtgtcgctatggcaacgcacaaggacgacgaagagcgattttttccatccagcggagtcttgatgtttgggaaacagggagctggaaaagacaacgtggactatagcagcgttatgctaaccagtgaggaagaaatcaaaaccaccaacccagtggccacagaacagtacggcgtggtggccgataacctgcaacagcaaaacgccgctcctattgtaggggccgtcaacagtcaaggagccttacctggcatggtctggcagaaccgggacgtgtacctgcagggtcctatctgggccaagattcctcacacggacggcaactttcatccttcgccgctgatgggaggctttggactgaaacacccgcctcctcagatcctgattaagaatacacctgttcccgcggatcctccaactaccttcagtcaagccaagctggcgtcgttcatcacgcagtacagcaccggacaggtcagcgtggaaattgaatgggagctgcagaaagagaacagcaagcgctggaacccagagattcagtatacttccaactataacaaatctgttaatgtggactttactgtggacactaatggtgtgtattcagagcctcgccccattggcaccagatacctgactcgtaatctgtaa

SEQ ID NO: 211 - DNA, 3167 bp, Artificial Sequence
  source: /note="Description of Artificial Sequence: Synthetic polynucleotide"
attgaatttagcggccgcgaattcgcccttcgcagagaccaaagttcaactgaaacgaattaaacggtttattgattaacaagcaattacagattacgagtcaggtacctggtgccaatggggcgaggctctgaatacacaccattagtgtccacagtaaagtccacattaacagatttgttgtagttggaagtgtactgaatctcgggattccagcgtttgctgttctccttctgcagctcccactcgatctccacgctgacctgccccgtggagtactgtgtaatgaaggaagcaaactttgccgcactgaaggtagtcgaaggattcgcaggtaccggggtgttcttgatgagaatctgcgggggagggtgtttaagtccgaatccgcccatgaggggagaggggtgaaaatgtccgtccgtgtgtggaatctttgcccagatgggcccctgcaggtacacgtctctgtcctgccacaccatgcctggaagaacgccttgtgtgttgacatctgaggtagctgcttgtgtgttgccgctctggaggttggtagatacagaaccatactgctccgtagccacgggattggtggtcctgatttcctcttcgtctgtaatcatgaccttttcaatgtccacattagtttttcccgagtcttgttttccaaagatgagaaccccgctctgaggaaaaaacttttcttcatcgtccttgtggctggccatggccgggcccggattcaccagagagtctcttccattaaggtggtacttggtagctccagtccacgagtattcactgttgttgttatccgcagatgtctttgatactcgctgctggcggtaacagggtccaggaagccagttcctagactggtcccgaatgtcacttgctccggcctgagaaaactgaagccttgactgcgtggtggttccgcttggagtgtttgttctgctcaagtaatacaggtactggtcgatgagaggattcatgagacggtccaaactctggctgtgggcgtagctgctgtggaaaggaacgtcctcaaaggtgtagctgaaggtaaagttgtttccggtacgcagcatctgagaaggaaagtactccaggcagtaaaatgaagagcgtcctactgcctgactcccgttgttcagggtgaggtatccatactgtggcaccatgaagacgtctgctgggaacggcgggaggcatccttgatgcgccgagccgaggacgtacgggagctggtactccgagtcagtaaacacctgaaccgtgctggtaaggttattggcaatcgtcgtcgtaccgtcattctgcgtgacctccttgacttgaatgttaaagagcttgaagttgagtcttttgggccggaatccccaattgttgttgatgagtctttgccagtcacgtggcgaaaagtggcagtggaatctgttgaagtcaaaatacccccaaggggtgctgtagccaaagtagtggttgtcgtttgaggctcctgattggctggaaatctgcttgtagaggtggttgttgtaggtgggcagagcccaggtgcgggtgctggtggtgatgactctgtcgcccatccatgtggaatcgcaatgccaatttcccgaggaattacccactccgtcggcgccctcgttattgtctgccattggtgcgccactgcctgtagccatcgtattagttcccagaccagagggggctgctggtggctgtccgagaggctgggggtcaggtacggagtctgcgtctccagtctgaccgaaattcaatctctttcttgcaggctgctggcccgcttttccggttcccgaggaggagtctggctccgcaggagagtgctctaccggcctcttttttcccggagccgtcttaacaggttcctcaaccaggcccagaggttcaagaaccctctttttcgcctggaagactgctcgtccgaggttgcccccaaaagacgtatcttctttaagacgctcctggaactccgcgtcggcgtggttgtacttggggtacgggttgtctccgctgtcgagctgccggtcgtaggccttgtcgtgctcgagggccgcggcgtctgcctcgttgaccggctctcccttgtcgagtccgttgaagggtccaaggtacttgtacccaggaagcacaagacccctgctgtcgtccttatgccgctctgcgggctttggtggtggtgggccaggtttgagcttccaccactgtcttattccttcagagagagtgtcctcgagccaatctggaagataaccatcggcagccatacctgatttaaatcatttattgttcagagatgcagtcatccaaatccacattgaccagatcgcaagcagtgcaagcgtctggcacctttcccatgatatgatgaatgtagcacagtttctgatacgcctttttgacgacagaaacgggttgagattctgacacgggaaagcactctaaacagtctttctgtccgtgagtgaagcagatatttgaattctgattcattctctcgcattgtctgcagggaaacagcatcagattcatgcccacgtgacgagaacatttgttttggtacctgtccgcgtagttgattgaagcttccgcgtctgacgtcgatggctgcgcaactgactcgcgcgcccgtttgggctcacttatatctgcgtcactgggggcgggtctttttttggctccaccctttttgacgtagaattcatgctctacctcaaccacgtgatcctttgcccaccggaaaaagtctttgacttcctgcttggtgaccttcccaaagtcatgatccagacggcgggtgagttcaaatttgaacatccggtcttgcaacggctgctggtgttcgaaggtcgttgagttcccgtcaatcactgcgcacatgttggtgttggaggtgacaatcacgggagtcgggtctatctgggccgaggacttgcatttctggtccacgcgcaccttgcttcctccgagaatggctttggccgactccacgaccttggcggtcatcttcccctcctcccaccagatcaccatcttgtcgacgcaatcattgaaaggaaagttctcattggtccagttgacgcagccgtagaaagggcgaattcgtttaaacctgcaggactagtccctttagtgagggt

SEQ ID NO: 212 - DNA, 3161 bp, Artificial Sequence
  source: /note="Description of Artificial Sequence: Synthetic polynucleotide"
aattgaatttagcggccgcgaattcgcccttcgcagagaccaaagttcaactgaaacgaattaaacggtttattgattaacaagcaattacagattacgagtcaggtatctggtgccaatggggcgaggctctgaatacacaccattagtgtccacagtaaagtccacattaacagatttgttgtagttggaagtgtactgaatctcgggattccagcgtttgctgttctccttctgcagctcccactcgatctccacgctgacctgccccgtggagtactgtgtaatgaaggaagcaaactttgccgcactgaaggtagtcgaaggattcgcaggtaccggggtgttcttgatgagaatctgcgggggagggtgtttaagtccgaatccgcccatgaggggagaggggtgaaaatgtccgtccgtgtgtggaatctttgcccagatgggcccctgcaggtacacgtctctgtcctgccacaccatgcctggaagaacgccttgtgtgttgacatctgaggtagctgcttgtgtgttgccgctctggaggttggtagatacagaaccatactgctccgtagccacgggattggtggtcctgatttcctcttcgtctgtaatcatgaccttttcaatgtccacattagtttttcccgagtcttgttttccaaagatgagaaccccgctctgaggaaaaaacttttcttcatcgtccttgtggctggccatggccgggcccggattcaccagagagtctcttccattaaggtggtacttggtagctccagtccacgagtattcactgttgttgttatccgcagatgtctttgatactcgctgctggcggtaacagggtccaggaagccagttcctagactggtcccgaatgtcacttgctccggcctgagaaaactgaagccttgactgcgtggtggttccgcttggagtgtttgttctgctcaagtaatacaggtactggtcgacgagaggattcatgagacggtccaaactctggctgtgggcgtagctgctgtggaaaggaacgtcctcaaaggtgtagctgaaggtaaagttgtttccggtacgcagcatctgagaaggaaagtactccaggcagtaaaatgaagagcgtcctactgcctgactcccgttgttcagggtgaggtatccatactgtggcaccatgaagacgtctgctgggaacggcgggaggcatccttgatgcgccgagccgaggacgtacgggagctggtactccgagtcagtaaacacctgaaccgtgctggtaaggttattggcaatcgtcgtcgtaccgtcattctgcgtgacctccttgacttgaatgttaaagagcttgaagttgagtcttttgggccgggatccccaattgttgttgatgagtctttgccagtcacgtggcgaaaagtggcagtggaatctgttgaagtcaaaatacccccaaggggtgctgtagccaaagtagtggttgtcgtttgaggctcctgattggctggaaatctgcctgtagaggtggttgttgtaggtgggcagagcccaggtgcgggtgctggtggtgatgactctgtcgcccatccatgtggaatcgcaatgccaatttcccgaggaattacccactccgtcggcgccctcgttattgtctgccattggtgcgccactgcctgtagccatcgtattagttcccagaccagagggggctgctggtggctgtccgagaggctgggggtcaggtacggagtctgcgtctccagtctgaccgaaattcaatctccttcttgcaggctgctggcccgcttttccggttcccgaggaggagtctggctccgcaagagagtgctctaccggcctcttttttcccggagccgtcttaacaggttcctcaaccaggcccagaggttcaagaaccctctttttcgcctggaagactgctcgtccgaggttgcccccaaaagacgtatcttctttaagacgctcctggaactccgcgtcggcgtggttgtacttgaggtacgggttgtctccgccgtcgagctgccggtcgtaggccttgtcgtgctcgagggccgcggcgtctgcctcgttgaccggctctcccttgtcgagtccgttgaagggtccaaggtacttgtacccaggaagcacaagacccctgctgtcgtccttatgccgctctgcgggctttggtggtggtgggccaggtttgagcttccaccactgtcttattccttcagagagagtgtcctcgagccaatctggaagataaccatcggcagccatacctgatttaaatcatttattgttcagagatgcagtcatccaaatccacattgaccagatcgcaagcagtgcaagcgtctggcacctttcccatgatatgatgaatgtagcacagtttctgatacgcctttttgacgacagaaacgggttgagattctgacacgggaaagcactctaaacagtctttctgtccgtgagtgaagcagatatttgaattctgattcattctctcgcattgtctgcagggaaacagcatcagattcatgcccacgtgacgagaacatttgttttggtacctgtccgcgtagttgattgaagcttccgcgtctgacgtcgatggctgcgcaactgactcgcgcgcccgtttgggctcacttatatctgcgtcactgggggcgggtctttttttggctccaccctttttgacgtagaattcatgctctacctcaaccacgtgatcctttgcccaccggaaaaagtctttgacttcctgcttggtgaccttcccaaagtcatgatccagacggcgggtgagttcaaatttgaacatccggtcttgcaacggctgctggtgttcgaaggtcgttgagttcccgtcaatcactgcgcacatgttggtgttggaggtgacaatcacgggagtcgggtctatctgggccgaggacttgcatttctggtccacgcgcaccttgcttcctccgagaatggctttggccgactccacgaccttggcggtcatcttcccctcctcccaccagatcaccatcttgtcgacgcaatcattgaaaggaaagttctcattggtccagttgacgcagcaagggcgaattcgtttaaacctgcaggactagtccctttagtgaggg

SEQ ID NO: 213 - DNA, 3172 bp, Artificial Sequence
  source: /note="Description of Artificial Sequence: Synthetic polynucleotide"
gattgaatttagcggccgcgaattcgcccttgctgcgtcaactggaccaatgagaactttcccttcaacgattgcgtcgacaagatggtgatctggtgggaggagggcaagatgaccgccaaggtcgtggagtccgccaaggccattctgggtggaagcaaggtgcgcgtggaccaaaagtgcaagtcatcggcccagatcgaccccacgcccgtgatcgtcacctccaacaccaacatgtgcgccgtgatcgacgggaacagcaccaccttcgagcaccagcagcccctgcaggaccgcatgttcaagttcgagctcacccgccgtctggagcacgactttggcaaggtgaccaagcaggaagtcaaagagttcttccgctgggctcaggatcacgtgactgaggtggcgcatgagttctacgtcagaaagggcggagccaccaaaagacccgcccccagtgacgcggatataagcgagcccaagcgggcctgcccctcagttgcggagccatcgacgtcagacgcggaagcaccggtggactttgcggacaggtaccaaaacaaatgttctcgtcacgcgggcatgcttcagatgctgtttccctgcaagacatgcgagagaatgaatcagaatttcaacgtctgcttcacgcacggggtcagagactgctcagagtgcttccccggcgcgtcggaatctcaacccgtcgtcagaaaaaagacgtatcagaaactgtgcgcgattcatcatctgctggggcgggcacccgagattgcgtgttcggcctgcgatctcgtcaacgtggacttggatgactgtgtttctgagcaataaatgacttaaaccaggtatggctgctgacggttatcttccagattggctcgaggacaacctctctgagggcattcgcgagtggtgggacctgaaacctggagcccccaagcccaaggccaaccagcagaagcaggacgacggccggggtctggtgcttcctggctacaagtacctcggacccttcaacggactcgacaagggggagcccgtcaacgcggcggacgcagcggccctcgagcacgacaaggcctacgaccagcagctcaaagcgggtgacaatccgtacctgcggtataaccacgccgacgccgagtttcaggagcgtctgcaagaagatacgtcttttgggggcaacctcgggcgagcagtcttccaggccaagaagcgggttctcgaacctctcggtctggttgaggaagctgctaagacggctcctggaaagaagagaccggtagaaccgtcacctcagcgttcccccgactcctccgcgggcatcggcaagaaaggccagcagcccgctaaaaagagactgaactttggtcagactggcgactcagagtcagtccccgaccctcaaccaatcggagaaccaccagcaggcccctctggtctgggatctggtacaatggctgcaggcggtggcgctccaatggcagacaataacgaaggcgccgacggagtgggtagttcctcaggaaattggcattgcgattccacatggctgggcgacagagtcatcaccaccagcacccgaacctgggccctgcccacctacaacaaccacctctacaagcaaatatccaatgggacatcgggaggaagcaccaacgacaacacctacttcggctacagcaccccctgggggtattttgacttcaacagattccactgccacttctcaccacgtgactggcagcgactcatcaacaacaactggggattccggccaaaaagactcagcttcaagctcttcaacatccaggtcaaggaggtcacgcagaatgaaggcaccgagaccatcgccaataaccttaccagcacgattcaggtatttacggactcggaataccagctgccgtacgtcctcggctccgcgcaccagggctgcctgcctccgttcccggcggacgtcttcatgattccccagtacggctaccttacactgaacaatggaagtcaagccgtaggccgttcctccttctactgcctggaatattttccatctcaaatgctgcgaactggaaacaattttgaattcagctacaccttcgaggacgtgcctttccacagcagctgcgcacacagccagagctcggaccgactgatgaatcctctcatcgaccagtacctgtactacttatccagaactcggtccacaggaggaactcaaggtacccagcaattgttattttctcaagctgggcctgcaaacatgtcggctcaggctaagaactggctacctggaccttgctaccggcagcagcgagtctctacgacactgtcgcaaaacaacaacagcaactttgcttggactggtgccaccaaatatcacctgaacggaagagactctttggtaaatcccggtgtcgccatggcaacccacaaggacgacgaggaacgcttcttcccgtcgagtggagtcctgatgtttggaaaacagggtgctggaagagacaatgtggactacagcagcgttatgctaaccagcgaagaagaaattaaaaccactaaccctgtagccacagaacaatacggtgtggtggctgacaacttgcagcaaaccaatacagggcctattgtgggaaatgtcaacagccaaggagccttacctggcatggtctggcagaaccgagacgtgtacctgcagggtcccatctgggccaagattcctcacacggacggcaacttccacccttcaccgctaatgggaggatttggactgaagcacccacctcctcagatcctgatcaagaacacgccggtacctgcggatcctccaacaacgttcagccaggcgaaattggcttccttcattacgcagtacagcaccggacaggtcagcgtggaaatcgagtgggagctgcagaaggagaacagcaaacgctggaacccagagattcagtacacttcaaactactacaaatctacaaatgtggactttgctgtcaatacagagggaacttattctgagcctcgccccattggtactcgttacctcacccgtaatctgtaattgctggttaatcaataaaccgtttgattcgtttcagttgaactttggtctctgcgaagggcgaattcgtttaaacctgcaggactagtccctttagtgagg

SEQ ID NO: 214 - DNA, 3172 bp, Artificial Sequence
  source: /note="Description of Artificial Sequence: Synthetic polynucleotide"
gattgaatttagcggccgcgaattcgcccttgctgcgtcaactggaccaatgagaactttcccttcaacgattgcgtcgacaagatggtgatctggtgggaggagggcaagatgaccgccaaggtcgtggagtccgccaaggccattctgggtggaagcaaggtgcgcgtggaccaaaagtgcaagtcatcggcccagatcgaccccacgcccgtgatcgtcacctccaacaccaacatgtgcgccgtgatcggcgggaacagcaccaccttcgagcaccagcagcccctgcaggaccgcatgttcaagttcgagctcacccgccgtctggagcacgactttggcaaggtgaccaagcaggaagtcaaagagttcttccgctgggctcaggatcacgtgactgaggtggcgcatgagttctacgtcagaaagggcggagccaccaaaagacccgcccccagtgacgcggatataagcgagcccaagcgggcctgcccctcagttgcggagccatcgacgtcagacgcggaagcaccggtggactttgcggacaggtaccaaaacaaatgttctcgtcacgcgggcatgcttcagatgctgtttccctgcaagacatgcgagagaatgaatcagaatttcaacgtctgcttcacgcacggggtcagagactgctcagagtgcctccccggcgcgtcagaatctcaacccgtcgtcagaaaaaagacgtatcagaaactgtgcgcgattcatcatctgctggggcgggcacccgagattgcgtgttcggcctgcgatctcgtcaacgtggacttggatgactgtgtttctgagcaataaatgacttaaaccaggtatggctgctgacggttatcttccagattggctcgaggacaacctctctgagggcattcgcgagtggtgggacctgaaacctggagcccccaagcccaaggccaaccagcagaagcaggacgacggccggggtctggtgcttcttggctacaagtacctcggacccttcaacggactcgacaagggggagcccgtcaatgcggcggacgcagcggccctcgagcacgacaaggcctacgaccagcagctcaaagcgggtgacaatccgtacctgcggtataaccacgccgacgccgagtttcaggagcgtctgcaagaagatacgtcttttgggggcaacctcgggcgagcagtcttccaggccaagaagcgggttctcgaacctctcggtctggttgaggaagctgctaagacggctcctggaaagaagagaccggtagaaccgtcacctcagcgttcccccgactcctccacgggcatcggcaagaaaggccagcagcccgctaaaaagagactgaactttggtcagactggcgactcagagtcagtccccgaccctcaaccaatcggagaaccaccagcaggcccctctggtctgggatctggtacaatggctgcaggcggtggcgctccaatggcagacaataacgaaggcgccgacggagtgggtagttcctcaggaaattggcattgcgattccacatggctgggcgacagagtcatcaccaccagcacccgaacctgggccctgcccacctacaacaaccacctctacaagcaaatatccaatgggacatcgggaggaagcaccaacgacaacacctacttcggctacagcaccccctgggggtattttgacttcaacagattccactgccacttctcaccacgtgactggcagcgactcatcaacaacaactggggattccggccaaaaagactcagcttcaagctcttcaacatccaggtcaaggaggtcacgcagaatgaaggcaccaagaccatcgccaataaccttaccagcacgattcaggtatttacggactcggaataccagctgccgtacgtcctcggctccgcgcaccagggctgcctgcctccgttcccggcggacgtcttcatgattccccagtacggctaccttacactgaacaatggaagtcaagccgtaggccgttcctccttctactgcctggaatattttccatctcaaatgctgcgaactggaaacaattttgaattcagctacaccttcgaggacgtgcctttccacagcggctacgcacacagccagagcttggaccgactgatgaatcctctcatcgaccagtacctgtactacttatccagaactcagtccacaggaggaactcaaggtacccagcaattgttattttctcaagctgggcctgcaaacatgtcggctcaggctaagaactggctacctggaccttgctaccggcagcagcgagtctctacgacactgtcgcaaaacaacaacagcaactttgcttggactggtgccaccaaatatcacctgaacggaagagactctttggtaaatcccggtgtcgccatggcaacccacaaggacgacgaggaacgcttcttcccgtcgagtggagtcctgatgtttggaaaacagggtgctggaagagacaatgtggactacagcagcgttatgctaaccagcgaagaagaaattaaaaccactaaccctgtagccacagaacaatacggtgtggtggctgacaacttgcagcaaaccaatacagggcctattgtgggaaatgtcaacagccaaggagccttacctggcatggtctggcagaaccgagacgtgtacctgcagggtcccatctgggccaagattcctcacacggacggcaacttccacccttcaccgctaatgggaggatttggactgaagcacccacctcctcagatcctgatcaagaacacgccggtacctgcggatcctccaacgacgttcagccaggcgaaattggcttccttcattacgcagtacagcaccggacaggtcagcgtggaaatcgagtgggagctgcagaaggagaacagcaaacgctggaacccagagattcagtacacttcaaactactacaaatctacaaatgtggactttgctgtcaatacagagggaacttattctgagcctcgccccattggtactcgttacctcacccgtaatctgtaattgctggttaatcaataaaccgtttgattcgtttcagttgaactttggtctctgcgaagggcgaattcgtttaaacctgcaggactagtccctttagtgagg

SEQ ID NO: 215 - DNA, 2208 bp, Artificial Sequence
  source: /note="Description of Artificial Sequence: Synthetic polynucleotide"
atggctgccgatggttatcttccagattggctcgaggacactctctctgaaggaataagacagtggtggaagctcaaacctggcccaccaccaccaaagcccgcagagcggcataaggacgacagcaggggtcttgtgcttcctgggtacaagtacctcggacccttcaacggactcgacaagggagagccggtcaacgaggcagacgccgcggccctcgagcacgacaaggcctacgaccggcagctcgaaagcggagacaacccgtacctcaagtacaaccacgccgacgcggagtttcaggagcgtcttaaagaagatacgtcttttgggggcaacctcggacgagcagtcttccaggcgaaaaagagggttcttgaacctctgggcctggttgaggagcctgttaaaacggctccgggaaaaaagaggccggtagagcactctcctgtggagccagactcctcctcgggaaccggaaaagcgggccagcagcctgcgagaaaaagattgaattttggtcagactggagacgcagactccgtacctgacccccagcctctcggacagccaccagcagccccctctggtctgggatctactacaatggcttcaggcagtggcgcaccagtggcagacaataacgagggtgccgatggagtgggtaattcctcaggaaattggcattgcgattcccaatggctgggcgacagagtcatcaccaccagcacccgaacctgggccctgcccacctacaacaaccacctctacaagcaaatctccagccaatcaggagcctcaaacgacaaccactactttggctacagcaccccctgggggtattttgacttcaacagattccactgccacttttcaccacgtgactggcaaagactcatcaacaacagctggggattccgacccaaaagactcaacttcaagctctttaacattcaagtcaaagaggtcacgcagaatgacggtacgacgacgattgccaataaccttaccagcacggttcaagtgtttaccgactcggagtaccagctcccgtacgtcctcggctcggcgcatcaaggatgcctcccgccgttcccagcagacgtctttatggtcccacagtatggatacctcaccctgaacaacgggagtcaggcggtaggacgctcttccttttactgcctggagtactttccttctcagatgctgcgtactggaaacaactttcagttcagctacacctttgaagacgttcccttccacagcagctacgctcacagccagagtctggatcggctgctgaatcctctgatcgaccagtacctatattatctgaacaagacacaatcaaatagtggaactcttcagcagtctcggctactgtttagccaagctggacccaccagcatgtctcttcaagctaaaaactggctgcctggaccttgctacagacagcagcgtctgtcaaagcaggcaaacgacaacaacaacagcaactttccctggactgcggctacaaagtatcatctaaatggccgggactcgttggttaatccaggaccagctatggccagccacaaagacgatgaagaaaagtttttccccatgcatggaaccctgatatttggtaaacaaggaacaaatgctaacgacgcggatttggacaatgtcatgattacagatgaagaagaaatccgcaccaccaatcccgtggctacggagcagtacggatatgtgtcaaataatttgcaaaactcaaatactggtccaactactggaactgtcaatcaccaaggagcgttacctggtatggtgtggcaggatcgagacgtgtacctgcagggacccatttgggccaagattcctcacacggacgggcactttcatccttctccactaatgggaggttttgggctcaaacacccgcctcctcagatcatgatcaaaaacactcccgttccagccaatcctcctacaaacttcagttcttccaagtttgcttctttcatcacacagtattccacggggcaggtcagcgtggagatcgagtgggagctgcagaaggagaacagcaaacgctggaatcccgaaattcagtatacttccaactacaacaaatctgttaatgtggactttactgtggacactaatggtgtgtattcagagcctcgccccattggcaccagatacccgactcgtaatctgtaa

SEQ ID NO: 216 - protein, 735 aa, Artificial Sequence
  source: /note="Description of Artificial Sequence: Synthetic polypeptide"
MAADGYLPDWLEDTLSEGIRQWWKLKPGPPPPKPAERHKDDSRGLVLPGYKYLGPFNGLDKGEPVNEADAAALEHDKAYDRQLESGDNPYLKYNHADAEFQERLKEDTSFGGNLGRAVFQAKKRVLEPLGLVEEPVKTAPGKKRPVEHSPVEPDSSSGTGKAGQQPARKRLNFGQTGDADSVPDPQPLGQPPAAPSGLGSTTMASGSGAPVADNNEGADGVGNSSGNWHCDSQWLGDRVITTSTRTWALPTYNNHLYKQISSQSGASNDNHYFGYSTPWGYFDFNRFHCHFSPRDWQRLINNSWGFRPKRLNFKLFNIQVKEVTQNDGTTTIANNLTSTVQVFTDSEYQLPYVLGSAHQGCLPPFPADVFMVPQYGYLTLNNGSQAVGRSSFYCLEYFPSQMLRTGNNFQFSYTFEDVPFHSSYAHSQSLDRLLNPLIDQYLYYLNKTQSNSGTLQQSRLLFSQAGPTSMSLQAKNWLPGPCYRQQRLSKQANDNNNSNFPWTAATKYHLNGRDSLVNPGPAMASHKDDEEKFFPMHGTLIFGKQGTNANDADLDNVMITDEEEIRTTNPVATEQYGYVSNNLQNSNTGPTTGTVNHQGALPGMVWQDRDVYLQGPIWAKIPHTDGHFHPSPLMGGFGLKHPPPQIMIKNTPVPANPPTNFSSSKFASFITQYSTGQVSVEIEWELQKENSKRWNPEIQYTSNYNKSVNVDFTVDTNGVYSEPRPIGTRYPTRNL

SEQ ID NO: 217 - DNA, 2208 bp, Artificial Sequence
  source: /note="Description of Artificial Sequence: Synthetic polynucleotide"
atggctgccgatggttatcttccagattggctcgaggacactctctctgaaggaataagacagtggtggaagctcaaacctggcccaccaccaccaaagcccgcagagcggcataaggacgacagcaggggtcttgtgcttcctgggtacaagtacctcggacccttcaacggactcgacaagggagagccggtcaacgaggcagacgccgcggccctcgagcacgacaaggcctacgaccggcagctcgacagcggagacaacccgtacctcaagtacaaccacgccgacgcggagtttcaggagcgtcttaaagaagatacgtcttttgggggcaacctcggacgagcagtcttccaggccaaaaagaggattcttgaacctctgggcctggttgaggaacctgttaagacggctccgggagaaaagaggccggtagagcactctcctgcggagccagactcctcctcgggaaccggaaaagcgggccagcagcctgcaagaaagagattgaattttggccagactggagacgcagactcagtacctgacccccagcctctcggacagccaccagcagccccctctggtctgggaactaatacgatggcttcaggcagtggcgcaccaatggcagacaataacgagggcgccgacggagtgggtaattcctcgggaaattggtattgcgattccacatggatgggcgacagagtcatcaccaccagcacccgcacctgggccctgcccacctacaacaaccatctgtacaagcaaatctccagccagtctggagccagcaacgacaaccactactttggctacagcaccccctgggggtattttgacttcaacagattccactgccacttctccccacgtgactggcaaagactcatcaacaacaactggggattccggcccaagagactcagcttcaagctctttaacattcaagtcaaagaggtcacgcagaatgacggtacgacgacgattgccaataaccttaccagcacggttcaggtgtttactgactcggagtaccagctcccgtacgtcctcggctcggcgcatcaaggatgcctcccgccgttcccagcagacgtcttcatggtgccacagtatggatacctcaccctgaacaacggcagtcaggcggtaggacgctcttccttttactgcctggagtactttccttctcagatgcttcgtaccggaaacaactttaccttcagctacacctttgaagacgttcctttccatagcagctacgctcacagccaaagtctggaccgtctcatgaatcctctcatcgaccagtacctgtattacttgagcagaacaaacactccaagcggaaccaccacgatgtccaggcttcagttttctcaggccggagcaagtgacattcgggaccagtctagaaactggcttcctggaccctgttaccgccagcagcgagtatcaaagacagctgcggacaacaacaacagtgattactcgtggactggagctaccaagtaccacctcaatggaagagactctctggtgaatccgggcccagctatggccagccacaaggacgatgaagaaaaatattttcctcagagcggggttctcatctttggaaaacaagactcgggaaaaactaatgtggacattgaaaaggttatgattacagacgaagaggaaatcaggaccaccaatcccgtggctacggagcagtatggttctgtatctaccaacctccagagcggcaacacacaagcagctacctcagatgtcaacacacaaggcgttcttccaggcatggtctggcaggacagagacgtgtacctgcaggggcccatctgggcaaagattccacacacggacggacattttcacccctctcccctcgtgggcggattcggacttaaacaccctcctccacaaattctcatcaagaacaccccggtacctgcgaatccttcgaccactttcagtgcggcaaagtttgcttccttcatcacacagtactccacggggcaggtcagcgtggagatcgagtgggagctgcagaaggagaacagcaaacgctggaatcccgaaattcagtacacttccaactacaacaaatctgttaatgtggactttactgtggacactaatggtgtgtattcagagcctcgccccattggcaccagatacctgactcgtaatctgtaa

SEQ ID NO: 218 - protein, 735 aa, Artificial Sequence
  source: /note="Description of Artificial Sequence: Synthetic polypeptide"
MAADGYLPDWLEDTLSEGIRQWWKLKPGPPPPKPAERHKDDSRGLVLPGYKYLGPFNGLDKGEPVNEADAAALEHDKAYDRQLDSGDNPYLKYNHADAEFQERLKEDTSFGGNLGRAVFQAKKRILEPLGLVEEPVKTAPGEKRPVEHSPAEPDSSSGTGKAGQQPARKRLNFGQTGDADSVPDPQPLGQPPAAPSGLGTNTMASGSGAPMADNNEGADGVGNSSGNWYCDSTWMGDRVITTSTRTWALPTYNNHLYKQISSQSGASNDNHYFGYSTPWGYFDFNRFHCHFSPRDWQRLINNNWGFRPKRLSFKLFNIQVKEVTQNDGTTTIANNLTSTVQVFTDSEYQLPYVLGSAHQGCLPPFPADVFMVPQYGYLTLNNGSQAVGRSSFYCLEYFPSQMLRTGNNFTFSYTFEDVPFHSSYAHSQSLDRLMNPLIDQYLYYLSRTNTPSGTTTMSRLQFSQAGASDIRDQSRNWLPGPCYRQQRVSKTAADNNNSDYSWTGATKYHLNGRDSLVNPGPAMASHKDDEEKYFPQSGVLIFGKQDSGKTNVDIEKVMITDEEEIRTTNPVATEQYGSVSTNLQSGNTQAATSDVNTQGVLPGMVWQDRDVYLQGPIWAKIPHTDGHFHPSPLVGGFGLKHPPPQILIKNTPVPANPSTTFSAAKFASFITQYSTGQVSVEIEWELQKENSKRWNPEIQYTSNYNKSVNVDFTVDTNGVYSEPRPIGTRYLTRNL

SEQ ID NO: 219 - DNA, 2209 bp, Artificial Sequence
  source: /note="Description of Artificial Sequence: Synthetic polynucleotide"
atggctgccgatggttatcctccagattggctcgaggacactctctctgaagggataagacagtggtggaagctcaaacctggcccaccaccaccaaagcccgcagagcggcataaggacgacagcaggggtcttgtgcttcctgggtacaagtacctcggacccttcaacggactcgacaagggggagccggtcaacgaggcagacgccgcggccctcgagcacgacaaggcctacgaccggcagctcgacagcggagacaacccgtacctcaagtacaaccacgccgacgcagagtttcaggagcgccttaaagaagatacgtcttttgggggcaacctcggacgagcagtcttccaggcgaaaaagagggttcttgaacctctgggcctggttgaggaacctgttaagacggctccgggaaaaaagaggccggtagagcactctcctgtggagccagactcctcctcgggaaccggaaaagcgggccagcggcctgcaagaaaaagattaaattttggtcagactggagacgcagactccgtacctgacccccagcctctcggacagccaccagcagccccctctggtctgggatctactacaatggctacaggcagtggcgcaccaatggcagacaataacgagggtgccgatggagtgggtaattcctcaggaaattggcattgcgattcccaatggctgggcgacagagtcatcaccaccagcacccgaacctgggccctgcccacatacaacaaccacctctacaagcaaatctccagccaatcaggagccagcaacgacaaccactactttggctacagcaccccctgggggtattttgacttcaacagattccactgccacttttcaccacgtgactggcaaagactcatcaacaacaactggggattccggcccaaaagactcaacttcaagctctttaatattcaagtcaaagaggtcacgcagaatgacggtacgacgacgattgccaataaccttaccagcacggttcaggtgtttactgactcggagtaccagctcccgtacgtcctgggctcggcgcatcaaggatgcctcccgccgtttccagcggacgtcttcatggtcccacagtatggatacctcaccctgaacaacgggagtcaggcggtaggacgctcttccttttactgcctggagtactttccttctcagatgctgcgtactggaaacaactttcagttcagctacacttttgaagacgtgcctttccacagcagctacgctcacagccagagtctggatcggctgatgaatcctctgatcgaccagtacctgtattatctgaacaagacacaaacaaatagtggaactcttcagcagtctcggctactgtttagccaagctggaccaaccaacatgtctcttcaagctaaaaactggctgcctggaccttgctacagacagcagcgtctgtcaaaacaggcaaacgacaacaacaacagcaactttccctggactgcagctacaaagtatcatctaaatggccgggactcgttggttaatccaggaccagctatggccagtcacaaggatgacgaagaaaagtttttccccatgcatggaaccctgatatttggtaaacaaggaacaaatgccaacgacgcggatttggaaaatgtcatgattacagatgaagaagaaatcagggccaccaatcccgtggctacggagcagtacgggactgtgtcaaataatttgcaaaactcaaacactggtccaactactggaactgtcaatcgccaaggagcgttacctggtatggtgtggcaggatcgagacgtgtacctgcagggacccatttgggccaagattcctcacaccgatggacactttcatccttctccactgatgggaggttttggactcaaacacccgcctcctcagatcatgatcaaaaacactcccgttccagccaatcctcccacaaacttcagttctgccaagtttgcttctttcatcacacagtattccacgggacaggtcagcgtggagatcgagtgggagctgcagaaggagaacagcaaacgctggaatcccgaaattcagtacacttccaactacaacaagtctgttaatgtggactttactgtggacactaatggtgtgtattcagagcctcgccccattggcaccagatacctgactcgtaatctgtaat

SEQ ID NO: 220 - protein, 735 aa, Artificial Sequence
  source: /note="Description of Artificial Sequence: Synthetic polypeptide"
MAADGYPPDWLEDTLSEGIRQWWKLKPGPPPPKPAERHKDDSRGLVLPGYKYLGPFNGLDKGEPVNEADAAALEHDKAYDRQLDSGDNPYLKYNHADAEFQERLKEDTSFGGNLGRAVFQAKKRVLEPLGLVEEPVKTAPGKKRPVEHSPVEPDSSSGTGKAGQRPARKRLNFGQTGDADSVPDPQPLGQPPAAPSGLGSTTMATGSGAPMADNNEGADGVGNSSGNWHCDSQWLGDRVITTSTRTWALPTYNNHLYKQISSQSGASNDNHYFGYSTPWGYFDFNRFHCHFSPRDWQRLINNNWGFRPKRLNFKLFNIQVKEVTQNDGTTTIANNLTSTVQVFTDSEYQLPYVLGSAHQGCLPPFPADVFMVPQYGYLTLNNGSQAVGRSSFYCLEYFPSQMLRTGNNFQFSYTFEDVPFHSSYAHSQSLDRLMNPLIDQYLYYLNKTQTNSGTLQQSRLLFSQAGPTNMSLQAKNWLPGPCYRQQRLSKQANDNNNSNFPWTAATKYHLNGRDSLVNPGPAMASHKDDEEKFFPMHGTLIFGKQGTNANDADLENVMITDEEEIRATNPVATEQYGTVSNNLQNSNTGPTTGTVNRQGALPGMVWQDRDVYLQGPIWAKIPHTDGHFHPSPLMGGFGLKHPPPQIMIKNTPVPANPPTNFSSAKFASFITQYSTGQVSVEIEWELQKENSKRWNPEIQYTSNYNKSVNVDFTVDTNGVYSEPRPIGTRYLTRNL

SEQ ID NO: 221 - DNA, 2208 bp, Artificial Sequence
  source: /note="Description of Artificial Sequence: Synthetic polynucleotide"
atggctgccgatggttatcttccagattggctcgaggacactctctctgaaggaataagacagtggtggaagctcaaacctggcccaccaccaccaaagcccgcagagcggcataaggacgacagcaggggtcttgtgcttcctgggtacaggtacctcggacccttcaacggactcgacaagggagagccggtcaacgaggcagacgccgcggccctcgagcacgacaaggcctacgaccggcagctcgacagcggagacaacccgtacctcaagtacaaccacgtcgacgcggagtttcaggagcgtcttaaagaagatacgtcttttgggggcaacctcggacgagcagtcttccaggccaaaaagaggattcttgaacctctgggcctggttgaggaacctgttaaggcggctccgggagaaaagaggccggtagagcactctcctgcggagccagactcctcctcgggaaccggaaaagcgggccagcagcctgcaagaaagagattgaattttggtcagactggagacgcagactcagtacctgacccccagcctctcggacagccaccagcagccccctctggtctgggaactaatacgatggcttcaggcagtggcgcaccaatggcagacaataacgagggcgccgacggagtgggtaattcctcgggaaattggcattgcgattccacatggatgggcgacagagtcatcaccaccagcacccgcacctgggccctgcccacctacaacaaccatctgtacaagcaaatctccagccagtctggagccagcaacgacaaccactactttggctacagcaccccctgggggcattttgacttcaacagattccactgccacttctccccacgtgactggcaaagactcatcaacaacaactggggattccggcccaagagactcagcttcaagctctttaacattcaagtcaaagaggtcacgcagaatgacggtacgacgacgattgccaataaccttaccagcacggttcaggtgtttactgactcggagtaccagctcccgtacgtcctcggctcggcgcatcaaggatgcctcccgccgttcccagcagacgtcttcatggtgccacagtatggatacctcaccctgaacaacggcagtcaggcggtaggacgctcttccttttactgcctggagtactttccttctcagatgcttcgtaccggaaacaactttaccttcagctacacctttgaagacgttcctttccatagcagctacgctcacagccaaagtctggaccgtctcatgaatcctctcatcgaccagtacctgtattacttgagcagaacaaacactccaagcggaaccaccacgatgtccaggcttcagttttctcaggccggagcaagtgacattcgggaccagtctagaaactggcttcctggaccctgttaccgccagcagcgagtatcaaagacagctgcggacaacaacaacagtgattactcgtggactggagctaccaagtaccacctcaatggaagagactctctggtgaatccgggcccagctatggccagccacaaggacgatgaagaaaaatattttcctcagagcggggttctcatctttggaaaacaagactcgggaaaaactaatgtggacattgaaaaggttatgattacagacgaagaggaaatcaggaccaccaatcccgtggctacggagcagtatggttctgtatctaccaacctccagagcggcaacacacaagcagctacctcagatgtcaacacacaaggcgttcttccaggcatggtctggcaggacagagacgtgtacctgcaggggcccatctgggcaaagattccacacacggacggacattttcacccctctccccccatgggcggattcggacttaaacaccctcctccacaaattctcatcaagaacaccccggtacctgcgaatccttcgaccactttcagtgcggcaaagtttgcttccttcatcacacagtactccacggggcaggtcagcgtggagatcgagtgggagctgcagaaggagaacagcaaacgctggaatcccgaaattcagtacacttccaactacaacaaatctgttaatgtggactttactgtggacactaatggtgtgtattcagagcctcgccccattggcgccagatacctgactcgtaatctgtaa

SEQ ID NO: 222 - protein, 735 aa, Artificial Sequence
  source: /note="Description of Artificial Sequence: Synthetic polypeptide"
MAADGYLPDWLEDTLSEGIRQWWKLKPGPPPPKPAERHKDDSRGLVLPGYRYLGPFNGLDKGEPVNEADAAALEHDKAYDRQLDSGDNPYLKYNHVDAEFQERLKEDTSFGGNLGRAVFQAKKRILEPLGLVEEPVKAAPGEKRPVEHSPAEPDSSSGTGKAGQQPARKRLNFGQTGDADSVPDPQPLGQPPAAPSGLGTNTMASGSGAPMADNNEGADGVGNSSGNWHCDSTWMGDRVITTSTRTWALPTYNNHLYKQISSQSGASNDNHYFGYSTPWGHFDFNRFHCHFSPRDWQRLINNNWGFRPKRLSFKLFNIQVKEVTQNDGTTTIANNLTSTVQVFTDSEYQLPYVLGSAHQGCLPPFPADVFMVPQYGYLTLNNGSQAVGRSSFYCLEYFPSQMLRTGNNFTFSYTFEDVPFHSSYAHSQSLDRLMNPLIDQYLYYLSRTNTPSGTTTMSRLQFSQAGASDIRDQSRNWLPGPCYRQQRVSKTAADNNNSDYSWTGATKYHLNGRDSLVNPGPAMASHKDDEEKYFPQSGVLIFGKQDSGKTNVDIEKVMITDEEEIRTTNPVATEQYGSVSTNLQSGNTQAATSDVNTQGVLPGMVWQDRDVYLQGPIWAKIPHTDGHFHPSPPMGGFGLKHPPPQILIKNTPVPANPSTTFSAAKFASFITQYSTGQVSVEIEWELQKENSKRWNPEIQYTSNYNKSVNVDFTVDTNGVYSEPRPIGARYLTRNL

SEQ ID NO: 223 - DNA, 2208 bp, Artificial Sequence
  source: /note="Description of Artificial Sequence: Synthetic polynucleotide"
atggctgccgatggttatcttccagattggctcgaggacaccctctctgaaggaataagacagtggtggaagctcaaacctggcccaccaccaccaaagcccgcagagcggcataaggacgacagcaggggtcttgtgcttcctgggtacaagtacctcggacccttcaacggactcgacaagggagagccggtcaacgaggcagacgccgcggccctcgagcacgacaaggcctacgaccggcagctcgacagcggagataacccgtacctcaagtacaaccacgccgacgcggagtttcaggagcgccttaaagaggatacgtcttttgggggcaacctcggacgagcagtcttccaggccaaaaagaggattcttgaacctctgggcctggttgaggaacctgttaagacggctccgggaaaaaagaggccggtagagcactctcctgcggagccagactcctcctcgggaaccggaaaagcgggccagcagcctgcaagaaagagattgaattttggtcagactggagacgcagactcagtacctgacccccggcctctcggacagccaccagcagccccctctggtctgggaactaatacgatggcttcaggcagtggcgcaccaatggcagacaataacgagggcgccgacggagtgggtaattcctcgggaaattggcattgcgattccacatggatgggcgacagagtcatcaccaccagcacccgcacctgggccctgcccacctacaacaaccatctgtacaagcaaatctccagccagtctggagccagcaacgacaaccactactttggctacagcaccccctgggggtattttgacttcaacagattccactgccacttctccccacgtgactggcaaagactcatcaacaacaactggggattccggcccaagagactcagcttcaagctctttaacattcaagtcaaagaggtcacgcagaatgacggtacgacgacgattgccaataaccttaccagcacggttcaggtgtttactgactcggagtaccagctcccgtacgtcctcggctcggcgcatcaaggatgcctcccgccgttcccagcagacgtcttcatggtgccacagtatggatacctcaccctgaacaacggcagtcaggcggtaggacgctcttccttttactgcctggagtactttccttctcagatgcttcgtaccggaaacaactttaccttcagctacacctttgaagacgttcctttccatagcagctacgctcacagccaaagtctggaccgtctcatgaatcctctcatcgaccagtacctgtattacttgagcagaacaaacactccaagcggaaccaccacgatgtccaggcttcagttttctcaggccggagcaagtgacattcgggaccagtctagaaactggcttcctggaccctgttaccgccagcagcgagtatcaaagacagctgcggacaacaacaacagtgattactcgtggactggagctaccaagtaccacctcaatggaagagactctctggtgaatccgggcccagctatggccagccacaaggacgatgaagaaaaatattttcctcagagcggggttctcatctttggaaaacaagactcgggaaaaactaatgtggacattgaaaaggttatgattacagacgaagaggaaatcaggaccaccaatcccgtggctacggagcagtatggttctgtatctaccaacctccagagcggcaacacacaagcagctacctcagatgtcaacacacaaggcgttcttccaggcatggtctggcaggacagagacgtgtacctgcaggggcccatctgggcaaagattccacacacggacggacattttcacccctctcccctcatgggcggattcggacttaaacaccctcctccacaaattctcatcaagaacaccccggtacctgcgaatccttcgaccactttcagtgcggcaaagtttgcttccttcatcacacagtactccacggggcaggtcagcgtggagatcgagtgggagctgcagaaggagaacagcaaacgctggaatcccgaaattcagtacacttccaactacaacaaatctgttaatgtggactttactgtggacactaatggtgtgtattcagagcctcgccccattggcaccagatacctgactcgtaatctgtaa

SEQ ID NO: 224 - protein, 735 aa, Artificial Sequence
  source: /note="Description of Artificial Sequence: Synthetic polypeptide"
MAADGYLPDWLEDTLSEGIRQWWKLKPGPPPPKPAERHKDDSRGLVLPGYKYLGPFNGLDKGEPVNEADAAALEHDKAYDRQLDSGDNPYLKYNHADAEFQERLKEDTSFGGNLGRAVFQAKKRILEPLGLVEEPVKTAPGKKRPVEHSPAEPDSSSGTGKAGQQPARKRLNFGQTGDADSVPDPRPLGQPPAAPSGLGTNTMASGSGAPMADNNEGADGVGNSSGNWHCDSTWMGDRVITTSTRTWALPTYNNHLYKQISSQSGASNDNHYFGYSTPWGYFDFNRFHCHFSPRDWQRLINNNWGFRPKRLSFKLFNIQVKEVTQNDGTTTIANNLTSTVQVFTDSEYQLPYVLGSAHQGCLPPFPADVFMVPQYGYLTLNNGSQAVGRSSFYCLEYFPSQMLRTGNNFTFSYTFEDVPFHSSYAHSQSLDRLMNPLIDQYLYYLSRTNTPSGTTTMSRLQFSQAGASDIRDQSRNWLPGPCYRQQRVSKTAADNNNSDYSWTGATKYHLNGRDSLVNPGPAMASHKDDEEKYFPQSGVLIFGKQDSGKTNVDIEKVMITDEEEIRTTNPVATEQYGSVSTNLQSGNTQAATSDVNTQGVLPGMVWQDRDVYLQGPIWAKIPHTDGHFHPSPLMGGFGLKHPPPQILIKNTPVPANPSTTFSAAKFASFITQYSTGQVSVEIEWELQKENSKRWNPEIQYTSNYNKSVNVDFTVDTNGVYSEPRPIGTRYLTRNL

SEQ ID NO: 225 - DNA, 2208 bp, Artificial Sequence
  source: /note="Description of Artificial Sequence: Synthetic polynucleotide"
atggctgccgatggttatcttccagattggctcgaggacactctctctgaaggaataagacagtggtggaagctcaaacctggcccaccaccaccaaagcccgcagagcggcataaggacgacagcaggggtcttgtgcttcctgggtacaagtacctcggacccttcaacggactcgacaagggagagccggtcaacgaggcagacgccgcggccctcgagcacgacaaggcctacgaccggcagctcgacagcggagacaacccgtacctcaagtacaaccacgccgacgcggagtttcaggagcgccttaaaggagatacgtcttttgggggcaacctcggacgagcagtcttccaggccaaaaagaggattcttgaacctctgggcctggttgaggaacctgttaagacggctccgggaaaaaagaggccggtagagcactctcctgcggagccagactcctcctcgggaaccggaaaagcgggccagcagcctgcaagaaagagattgaattttggtcagactggagacgcagactcagtacctgacccccagcctctcggacagccaccagcagccccctctggtctgggaactaatacgatggcttcaggcagtggcgcaccaatggcagacaataacgagggcgccgacggagtgggtaattcctcgggaaattggcattgcgattccacatggatgggcggcagagtcatcaccaccagcacccgcacctgggccctgcccacctacaacaaccatctgtacaagcaaatctccagccagtctggagccagcaacgacaaccactactttggctacagcaccccctgggggtattttgacttcaacagattccactgccacttctccccacgtgactggcaaagactcatcaacaacaactggggattccggcccaagagactcagcttcaagctctttaacattcaagtcaaagaggtcacgcagaatgacggtacgacgacgattgccaataaccttaccagcacggttcaggtgtttactgactcggagtaccagctcccgtacgtcctcggctcggcgcatcaaggatgcctcccgccgttcccagcagacgtcttcatggtgccacagtatggatacctcaccctgaacaacggcagtcaggcggtaggacgctcttccttttactgcctggagtactttccttctcagacgcttcgtaccggaaacaactttaccttcagctacacctttgaagacgttcctttccatagcagctacgctcacagccaaagtctggaccgtctcatgaatcctctcatcgaccagtacctgtattacttgagcagaacaaacactccaagcggaaccaccacgatgtccaggcttcagttttctcaggccggagcaagtgacattcgggaccagtctagaaactggcttcctggaccctgttaccgccagcagcgagtatcaaagacagctgcggacaacaacaacagtgattactcgtggactggagctaccaagtaccacctcaatggaagagactctctggtgaatccgggcccagctatggccagccacaaggacgatgaagaaaaatattttcctcagagcggggttctcatctttggaaaacaagactcgggaaaaactaatgtggacattgaaaaggttatgattacagacgaagaggaaatcaggaccaccaatcccgtggctacggagcagtatggttctgtatctaccaacctccagagcggcaacacacaagcagctacctcagatgtcaacacacaaggcgttcttccaggcatggtctggcaggacagagacgtgtacctgcaggggcccatctgggcaaagattccacacacggacggacattttcacccctctcccctcatgggcggattcggacttaaacaccctcctccacaaattctcatcaagaacaccccggtacctgcgaatccttcgaccactttcagtgcggcaaagtttgcttccttcatcacacagtactccacggggcaggtcagcgtggagatcgagtgggagctgcagaaggagaacagcaaacgctggaatcccgaaattcagtacacttccaactacaacaaatctgttaatgtggactttactgtggacactaatggtgtgtattcagagcctcgccccattggcaccagatacctgactcgtaatctgtaa

SEQ ID NO: 226 - protein, 735 aa, Artificial Sequence
  source: /note="Description of Artificial Sequence: Synthetic polypeptide"
MAADGYLPDWLEDTLSEGIRQWWKLKPGPPPPKPAERHKDDSRGLVLPGYKYLGPFNGLDKGEPVNEADAAALEHDKAYDRQLDSGDNPYLKYNHADAEFQERLKGDTSFGGNLGRAVFQAKKRILEPLGLVEEPVKTAPGKKRPVEHSPAEPDSSSGTGKAGQQPARKRLNFGQTGDADSVPDPQPLGQPPAAPSGLGTNTMASGSGAPMADNNEGADGVGNSSGNWHCDSTWMGGRVITTSTRTWALPTYNNHLYKQISSQSGASNDNHYFGYSTPWGYFDFNRFHCHFSPRDWQRLINNNWGFRPKRLSFKLFNIQVKEVTQNDGTTTIANNLTSTVQVFTDSEYQLPYVLGSAHQGCLPPFPADVFMVPQYGYLTLNNGSQAVGRSSFYCLEYFPSQTLRTGNNFTFSYTFEDVPFHSSYAHSQSLDRLMNPLIDQYLYYLSRTNTPSGTTTMSRLQFSQAGASDIRDQSRNWLPGPCYRQQRVSKTAADNNNSDYSWTGATKYHLNGRDSLVNPGPAMASHKDDEEKYFPQSGVLIFGKQDSGKTNVDIEKVMITDEEEIRTTNPVATEQYGSVSTNLQSGNTQAATSDVNTQGVLPGMVWQDRDVYLQGPIWAKIPHTDGHFHPSPLMGGFGLKHPPPQILIKNTPVPANPSTTFSAAKFASFITQYSTGQVSVEIEWELQKENSKRWNPEIQYTSNYNKSVNVDFTVDTNGVYSEPRPIGTRYLTRNL

SEQ ID NO: 227 - DNA, 2208 bp, Artificial Sequence
  source: /note="Description of Artificial Sequence: Synthetic polynucleotide"
atggctgccgatggttatcttccagattggctcgaggacactctctctgaaggaataagacagtggtggaagctcaaacctggcccaccaccaccaaagcccgcagagcggcataaggacgacagcaggggtcttgtgcttcctgggtacaagtacctcggacccttcaacggactcgacaagggagagccggtcaacgaggcagacgccgcggccctcgagcacgacaaggcctacgaccggcagctcgacagcggagacaacccgtacctcaagtacaaccacgccgacgcggagtttcaggagcgtcttaaagaagatacgtcttttgggggcaacctcggacgagcagtcttccaggccaaaaagaggattcttgaacctctgggcctggttgaggaacctgttaagacggctccgggaaaaaagaggccggtagagcactctcctgcggagccagactcctcctcgggaaccggaaaagcgggccagcagcctgcaagaaagagattgaattttggtcagactggagacgcagactcagtacctgacccccagcctctcggacagccaccagcagccccctctggtctgggaactaatacgatggcttcaggcagtggcgcaccaatggcagacaataacgagggcgccgacggagtgggtaattcctcgggaaattggcattgcgattccacatggatgggcgacagagtcatcaccaccagcacccgcacctgggccctgcccacctgcaacaaccatctgtacaagcaaatctccagccagtctggagccagcaacgacaaccactactttggctacagcaccccctgggggtattttgacttcaacagattccactgccacttctccccacgtgactggcaaagactcatcaacaacaactggggattccggcccaagagactcagcttcaagctctttaacattcaagtcaaagaggtcacgcagaatgacggtacgacgacgattgccaataaccttaccagcacggttcaggtgtttactgactcggagtaccagctcccgtacgtcctcggctcggcgcatcaaggatgcctcccgccgttcccagcagacgtcttcatggtgccacagtatggatacctcaccctgaacaacggcagtcaggcggtaggacgctcttccttttactgcctggagtattttccttctcagatgcttcgtaccggaaacaactttaccttcagctacacctttgaagacgttcctttccatagcagctacgctcacagccaaagtctggaccgtctcatgaatcctctcatcgaccagtacctgtattacttgagcagaacaaacactccaagcggaaccaccacgatgtccaggcttcagttttctcaggccggagcaagtgacattcgggaccagtctagaaactggcttcctggaccctgttaccgccagcagcgagtatcaaagacagctgcggacaacaacaacagtgattactcgtggactggagctaccaagtaccacctcaatggaagagactctctggtgaatccgggcccagctatggccagccacaaggacgatgaagaaaaatattttcctcagagcggggttctcatctttggaaaacaagactcgggaaaaactaatgtggacattgaaaaggttatgattacagacgaagaggaaatcaggaccaccaatcccgtggctacggagcagtatggttctgtatctacctacctccagagcggcaacacacaagcagctacctcagatgtcaacacacaaggcgttcttccaggcatggtctggcaggacagagacgtgtacctgcgggggcccatctgggcaaagattccacacacggacggacattttcacccctctcccctcatgggcggatttggacttaaacaccctcctccacaaattctcatcaagaacaccccggtacctgcgaatccttcgaccactttcagtgcggcaaagtttgcttccttcatcacacagtactccacggggcaggtcagcgtggagatcgagtgggagctgcagaaggagaacagcaaacgctggaatcccgaaattcagtacacttccaactacaacaaatctgttaatgtggactttactgtggacactaatggtgtgtattcagagcctcgccccattggcaccagatacctgactcgtaatctgtaa

SEQ ID NO: 228 - protein, 735 aa, Artificial Sequence
  source: /note="Description of Artificial Sequence: Synthetic polypeptide"
MAADGYLPDWLEDTLSEGIRQWWKLKPGPPPPKPAERHKDDSRGLVLPGYKYLGPFNGLDKGEPVNEADAAALEHDKAYDRQLDSGDNPYLKYNHADAEFQERLKEDTSFGGNLGRAVFQAKKRILEPLGLVEEPVKTAPGKKRPVEHSPAEPDSSSGTGKAGQQPARKRLNFGQTGDADSVPDPQPLGQPPAAPSGLGTNTMASGSGAPMADNNEGADGVGNSSGNWHCDSTWMGDRVITTSTRTWALPTCNNHLYKQISSQSGASNDNHYFGYSTPWGYFDFNRFHCHFSPRDWQRLINNNWGFRPKRLSFKLFNIQVKEVTQNDGTTTIANNLTSTVQVFTDSEYQLPYVLGSAHQGCLPPFPADVFMVPQYGYLTLNNGSQAVGRSSFYCLEYFPSQMLRTGNNFTFSYTFEDVPFHSSYAHSQSLDRLMNPLIDQYLYYLSRTNTPSGTTTMSRLQFSQAGASDIRDQSRNWLPGPCYRQQRVSKTAADNNNSDYSWTGATKYHLNGRDSLVNPGPAMASHKDDEEKYFPQSGVLIFGKQDSGKTNVDIEKVMITDEEEIRTTNPVATEQYGSVSTYLQSGNTQAATSDVNTQGVLPGMVWQDRDVYLRGPIWAKIPHTDGHFHPSPLMGGFGLKHPPPQILIKNTPVPANPSTTFSAAKFASFITQYSTGQVSVEIEWELQKENSKRWNPEIQYTSNYNKSVNVDFTVDTNGVYSEPRPIGTRYLTRNL

SEQ ID NO: 229 - DNA, 2208 bp, Artificial Sequence; identical to SEQ ID NO: 223
  source: /note="Description of Artificial Sequence: Synthetic polynucleotide"

SEQ ID NO: 230 - protein, 735 aa, Artificial Sequence; identical to SEQ ID NO: 224
  source: /note="Description of Artificial Sequence: Synthetic polypeptide"

SEQ ID NO: 231 - DNA, 2208 bp, Artificial Sequence
  source: /note="Description of Artificial Sequence: Synthetic polynucleotide"
atggctgccgatggttatcttccagattggctcgaggacactctctctgaaggaataagacagtggtggaagctcaaacctggcccaccaccaccaaagcccgcagagcggcataaggacggcagcaggggtcttgtgcttcctgggtacaagtacctcggacccttcaacggactcgacaagggagagccggtcaacgaggcagacgccgcggccctcgagcacgacaaggcctacgaccggcagctcaacagcggagacaacccgtacctcaagtacaaccacgccgacgcggagtttcaggagcgccttaaagaagatacgtcttttgggggcaacctcggacgagcagtcttccaggcaaaaaagagggttcttgaacctctgggcctggttgaggagcctgttaaaacggctccgggaaaaaagagaccggtagagcactctcctgcggagccagactcctcctcgggaaccggaaaagcgggccagcagcctgcaagaaagagattgaattttggtcagactggagacgcagactccgtacctgacccccagcctctcggacagccaccagcagccccctctggtctgggatctactacaatggctacaggcagtggcgcaccaatggcagacaataacgagggtgccgatggagtgggtaattcctcaggaaattggcattgcgattcccaatggctgggcgacagagtcatcaccacaagcactcgaacctgggccctgcccacctacaacaaccacctctacaagcaaatctccagccaatcaggagcctcaaacgacaaccactattttggctacagcaccccttgggggtattttgacttcaacagattccactgccacttttcaccacgtgactggcaaagactcatcaacaacaactggggattccgacccaagagactcaacttcaagctctttaacattcaagtcaaagaggtcacgcagaatgacggtacgacgacgattgccaataaccttaccagcacggttcaggtgtttactgactcggagtaccagctcccgtacgtcctcggctcggcgcatcaaggatgcctcccgccgttcccagcggacgtcttcatggtcccacagtatggatacctcaccctgaacaacgggagtcaggcggtaggacgctctcccttttactgcctggagtactttccttctcagatgctgcgtactggaaacaactttcagttcagctacacttttgaagacgtgcctttccacagcagctacgctcacagccagagtctggatcggctgatgaatcctctgatcgaccagtacctgtattatctgaacaagacacaaacaaatagtggaactcttcagcagtctcggctactgtttagccaagctggacccaccaacatgtctcttcaagctaaaaactggctgcctggaccttgctacagacagcagcgtctgtcaaagcaggcaaacgacaacaacaacagcaactttccctggactgcagctacaaagtatcatctaaatggccgggactcgttggttaatccaggaccagctatggccagtcacaaggatgacgaagaaaagtttttccccatgcatggaaccctgatatttggtaaacaaggaacaaatgccaacgacgcggatttggaaaatgtcatgattacagatgaagaagaaatcaggaccaccaatcccgtggctacggagcagtacgggactgtgtcaaataatttgcaaaactcaaacactggtccaactactggaactgtcaatcaccaaggagcgttacctggtatggtgtggcaggatcgagatgtgtaccttcagggacccatttgggccaagattcctcacaccgatggacactttcatccttctccactgatgggaggttttggactcaaacacccgcctcctcagattatgatcaaaaacactcccgttccagccaatcctcctacaaacttcagttctgccaagtttgcttctttcatcacacagtattccacggggcaggtcagcgtggagatcgagtgggagctgcagaaggagaacagcaaacgctggaatcccgaaattcagtacacttccaactacaacaaatctgttaatgtggactttactgtggacaataatggcgtgtactcagagcctcgccccattggcaccagatacctgactcgtaatctgtaa

SEQ ID NO: 232 - protein, 735 aa, Artificial Sequence
  source: /note="Description of Artificial Sequence: Synthetic polypeptide"
MAADGYLPDWLEDTLSEGIRQWWKLKPGPPPPKPAERHKDGSRGLVLPGYKYLGPFNGLDKGEPVNEADAAALEHDKAYDRQLNSGDNPYLKYNHADAEFQERLKEDTSFGGNLGRAVFQAKKRVLEPLGLVEEPVKTAPGKKRPVEHSPAEPDSSSGTGKAGQQPARKRLNFGQTGDADSVPDPQPLGQPPAAPSGLGSTTMATGSGAPMADNNEGADGVGNSSGNWHCDSQWLGDRVITTSTRTWALPTYNNHLYKQISSQSGASNDNHYFGYSTPWGYFDFNRFHCHFSPRDWQRLINNNWGFRPKRLNFKLFNIQVKEVTQNDGTTTIANNLTSTVQVFTDSEYQLPYVLGSAHQGCLPPFPADVFMVPQYGYLTLNNGSQAVGRSPFYCLEYFPSQMLRTGNNFQFSYTFEDVPFHSSYAHSQSLDRLMNPLIDQYLYYLNKTQTNSGTLQQSRLLFSQAGPTNMSLQAKNWLPGPCYRQQRLSKQANDNNNSNFPWTAATKYHLNGRDSLVNPGPAMASHKDDEEKFFPMHGTLIFGKQGTNANDADLENVMITDEEEIRTTNPVATEQYGTVSNNLQNSNTGPTTGTVNHQGALPGMVWQDRDVYLQGPIWAKIPHTDGHFHPSPLMGGFGLKHPPPQIMIKNTPVPANPPTNFSSAKFASFITQYSTGQVSVEIEWELQKENSKRWNPEIQYTSNYNKSVNVDFTVDNNGVYSEPRPIGTRYLTRNL

SEQ ID NO: 233 - DNA, 2208 bp, Artificial Sequence
  source: /note="Description of Artificial Sequence: Synthetic polynucleotide"
atggctgccgatggttatcttccagattggctcgaggacactctctctgaaggaataagacagtggtggaagctcaaacctggcccaccaccaccaaagcccgcagagcggcataaggacgacagcaggggtcttgtgcttcctgggtacaagtacctcggacccttcaacggactcgacaagggagagccggtcaacgaggcagacgccgcggccctcgagcacgacaaggcctacgaccggcagctcgacagcggagacaacccgtacctcaagtacaaccacgccgacgcggagtttcaggagcgtcttaaagaagatacgtcttttgggggcaacctcggacgagcagtcttccaggccaaaaagaggattcttgaacctctgggcctggttgaggaacctgttaagacggctccgggaaaaaagaggccggtagagcactctcctgcggagccagactcctcctcgggaaccggaaaagcgggccagcagcctgcaagaaagagattgaattttggtcagactggagacgcagactcagtacctgacccccagcctctcggacagccaccagcagccccctctggtctgggaactaatacgatggcttcaggcagtggcgcaccaatggcagacaataacgagggcgccgacggagtgggtaattcctcgggaaattggcattgcgattccacatggatgggcgacagagtcatcaccaccagcacccgcacctgggccctgcccacctacaacaaccatctgtacaagcaaatctccagccagtctggagccagcaacgacaaccactactttggctacagcaccccctgggggtattttgacttcaacagattccactgccacttctccccacgtgactggcaaagactcatcaacaacaactggggattccggcccaagagactcagcttcaagctctttaacattcaagtcaaagaggtcacgcagaatgacggtacgacgacgattgccaataaccttaccagcacggttcaggtgtttactgactcggagtaccagctcccgtacgtcctcggctcggcgcatcaaggatgcctcccgccgttcccagcagacgtcttcatggtgccacagtatggatacctcaccctgaacaacggcagtcaggcggtaggacgctcttccttttactgcctggagtactttccttctcagatgcttcgtaccggaaacaactttaccttcagctacacctttgaagacgttcctttccatagcagctacgctcacagccaaagtctggaccgtctcatgaatcctctcatcgaccagtacctgtattacttgagcagaacaaacactccaagcggaaccaccacgatgtccaggcttcagttttctcaggccggagcaagtgacattcgggaccagtctagaaactggcttcctggaccctgttaccgccagcagcgagtatcaaagacagctgcggacaacaacaacagtgattactcgtggactggagctaccaagtaccacctcaatggaagagactctctggtgaatccgggcccagctatggccagccacaaggacgatgaagaaaaatattttcctcagagcggggttctcatctttggaaaacaagactcgggaaaaactaatgtggacattgaaaaggttatgattacagacgaagaggaaatcaggaccaccaatcccgtggctacggagcagtatggttctgtatctaccaacctccagagcggcaacacacaagcagctacctcagatgtcaacacacaaggcgttcttccaggcatggtctggcaggacagagacgtgtacctgcaggggcccatctgggcaaagattccacacacggacggacattttcacccctctcccctcatgggcggattcggacttaaacaccctcctccacaaattctcatcaagaacaccccggtacctgcgaatccttcgaccactttcagtgcggcaaagtttgcttccttcatcacacagtactccacggggcaggtcagcgtggagatcgagtgggagctgcagaaggagaacagcaaacgctggaatcccgaaattcagtacacttccaactacaacaaatctgttaatgtggactttactgtggacactaatggtgtgtattcagagcctcgccccattggcaccagatacctgactcgtaatctgtaa

SEQ ID NO: 234 - protein, 735 aa, Artificial Sequence
  source: /note="Description of Artificial Sequence: Synthetic polypeptide"
MAADGYLPDWLEDTLSEGIRQWWKLKPGPPPPKPAERHKDDSRGLVLPGYKYLGPFNGLDKGEPVNEADAAALEHDKAYDRQLDSGDNPYLKYNHADAEFQERLKEDTSFGGNLGRAVFQAKKRILEPLGLVEEPVKTAPGKKRPVEHSPAEPDSSSGTGKAGQQPARKRLNFGQTGDADSVPDPQPLGQPPAAPSGLGTNTMASGSGAPMADNNEGADGVGNSSGNWHCDSTWMGDRVITTSTRTWALPTYNNHLYKQISSQSGASNDNHYFGYSTPWGYFDFNRFHCHFSPRDWQRLINNNWGFRPKRLSFKLFNIQVKEVTQNDGTTTIANNLTSTVQVFTDSEYQLPYVLGSAHQGCLPPFPADVFMVPQYGYLTLNNGSQAVGRSSFYCLEYFPSQMLRTGNNFTFSYTFEDVPFHSSYAHSQSLDRLMNPLIDQYLYYLSRTNTPSGTTTMSRLQFSQAGASDIRDQSRNWLPGPCYRQQRVSKTAADNNNSDYSWTGATKYHLNGRDSLVNPGPAMASHKDDEEKYFPQSGVLIFGKQDSGKTNVDIEKVMITDEEEIRTTNPVATEQYGSVSTNLQSGNTQAATSDVNTQGVLPGMVWQDRDVYLQGPIWAKIPHTDGHFHPSPLMGGFGLKHPPPQILIKNTPVPANPSTTFSAAKFASFITQYSTGQVSVEIEWELQKENSKRWNPEIQYTSNYNKSVNVDFTVDTNGVYSEPRPIGTRYLTRNL

SEQ ID NO: 235 - DNA, 2208 bp, Artificial Sequence
  source: /note="Description of Artificial Sequence: Synthetic polynucleotide"
atggctgccgatggttatcttccagattggctcgaggacactctctctgaaggaataagacagtggtggaagctcaaacctggcccaccaccaccaaagcccgcagagcggcataaggacgacagcaggggtcttgtgcttcctgggtacaagtacctcggacccttcaacggactcgacaagggagagccggtcaacgaggcagacgccgcggccctcgagcacgacaaggcctacgaccggcagctcgacagcggagacaacccgtacctcaagtacaaccacgccgacgcggagtttcaggagcgtcttaaagaagatacgtcttttgggggcaacctcggacgagcagtcttccaggccaaaaagaggattcttgaacctctgggcctggttgaggaacctgttaagacggctccgggaaaaaagaggccggtagagcactctcctgcggagccagactcctcctcgggaaccggaaaagcgggccagcagcctgcaagaaagagattgaattttggtcagactggagacgcagactcagtacctgacccccagcctctcggacagccaccagcagccccctctggtctgggaactaatacgatggcttcaggcagtggcgcaccaatggcagacaataacgagggcgccgacggagtgggtaattcctcgggaaattggcattgcgattccacatggatgggcgacagagtcatcaccaccagcacccgcacctgggccctgcccacctacaacaaccatctgtacaagcaaatctccagccagtctggagccagcaacgacaaccactactttggctacagcaccccctgggggtatttcgacttcaacagattccactgccacttctccccacgtgactggcaaagactcatcaacaacaactggggattccggcccaagagactcagcttcaagctctttaacattcaagtcaaagaggtcacgcagaatgacggtacgacgacgattgccaataaccttaccagcacggttcaggtgtttactgactcggggtaccagctcccgtacgtcctcggctcggcgcatcaaggatgccttccgccgttcccagcagacgtcttcatggtgccacagtatggatacctcaccctgaacaacggcagtcaggcggtaggacgctcttccttttactgcctggagtactttccttctcagatgcttcgtaccggaaacaactttaccttcagctacacctttgaagacgttcctttccatagcagctacgctcacggccaaagtctggaccgtctcatgaatcctctcatcgaccagtacctgtattacttgagcagaacaaacactccaagcggaaccaccacgatgtccaggcttcagttttctcaggccggagcaagtgacgttcgggaccagtctagaaactggcttcctggaccctgttaccgccagcagcgagtatcaaagacagctgcggacaacaacaacagtgattactcgtggactggagctaccaagtaccacctcaatggaagagactctctggtgaatccgggcccagctatggccagccacaaggacgatgaagaaaaatattttcctcagagcggggttctcgtctttggaaaacaagactcgggaaaaactaatgtggacattgaaaaggttatgattacagacgaagaggaaatcaggaccaccaatcccgcggctacggagcagtatggttctgtatctaccaacctccagagcggcaacacacaagcagctacctcagatgtcaacacacaaggcgttcttccaggcatggtctggcaggacagagacgtgtacctgcaggggcccatctgggcaaagattccacacacggacggacattttcacccctctcccctcatgggcggattcggacttaaacaccctcctccacaaattctcatcaagaacaccccggtacctgcgaatccttcgaccactttcagtgcggcaaagtttgtttccttcatcacacagtactccacggggcaggtcagcgtggagatcgagtgggagctgcagaaggagaacagcaaacgctggaatcccgaaattcagtacacttccaactacaacaaatctgttaatgtggactttactgtggacactaatggtgtgtattcagagcctcgccccattggcaccagatacctgactcgtaatctgtaa

SEQ ID NO: 236 - protein, 735 aa, Artificial Sequence
  source: /note="Description of Artificial Sequence: Synthetic polypeptide"
MAADGYLPDWLEDTLSEGIRQWWKLKPGPPPPKPAERHKDDSRGLVLPGYKYLGPFNGLDKGEPVNEADAAALEHDKAYDRQLDSGDNPYLKYNHADAEFQERLKEDTSFGGNLGRAVFQAKKRILEPLGLVEEPVKTAPGKKRPVEHSPAEPDSSSGTGKAGQQPARKRLNFGQTGDADSVPDPQPLGQPPAAPSGLGTNTMASGSGAPMADNNEGADGVGNSSGNWHCDSTWMGDRVITTSTRTWALPTYNNHLYKQISSQSGASNDNHYFGYSTPWGYFDFNRFHCHFSPRDWQRLINNNWGFRPKRLSFKLFNIQVKEVTQNDGTTTIANNLTSTVQVFTDSGYQLPYVLGSAHQGCLPPFPADVFMVPQYGYLTLNNGSQAVGRSSFYCLEYFPSQMLRTGNNFTFSYTFEDVPFHSSYAHGQSLDRLMNPLIDQYLYYLSRTNTPSGTTTMSRLQFSQAGASDVRDQSRNWLPGPCYRQQRVSKTAADNNNSDYSWTGATKYHLNGRDSLVNPGPAMASHKDDEEKYFPQSGVLVFGKQDSGKTNVDIEKVMITDEEEIRTTNPAATEQYGSVSTNLQSGNTQAATSDVNTQGVLPGMVWQDRDVYLQGPIWAKIPHTDGHFHPSPLMGGFGLKHPPPQILIKNTPVPANPSTTFSAAKFVSFITQYSTGQVSVEIEWELQKENSKRWNPEIQYTSNYNKSVNVDFTVDTNGVYSEPRPIGTRYLTRNL

SEQ ID NO: 237 - DNA, 2208 bp, Artificial Sequence
  source: /note="Description of Artificial Sequence: Synthetic polynucleotide"
atggctgccgatggttatcttccagattggctcgaggacactctctctgaaggaataagacagtggtggaaactcaaacctggcccaccaccaccaaagcccgcagagcggcataaggacgacagcaggggtcttgtgcttcctgggtacaagtacctcggacccttcaacggactcgacaagggagagccggtcaacgaggcagacgccgcggccctcgagcacgacaaggcctacgaccggcagctcgacagcggagacaacccgtacctcaagtacaaccacgccgacgcggagtttcaggagcgccttaaagaagatacgtcttttgggggcaacctcggacgagcagtcttccaggcaaaaaagagggttctggaacctctgagcctggttgaggagcctgttaagacggctccgggaaaaaagaggccggtagagcactctcccgcagagccagattcctcctccggaactggaaagtcgggcaaccagcctgcaagaaagagattgaatttcggtcagactggagactcagactccgtacctgacccccagcctctcggacagccaccagcagccccctctggtctgggaactaatacgatggctacaggcagtggcgcaccaatggcagacaataacgagggcgccgacggagtgggtaattcctcgggaaattggcattgcgattccacatggatgggcgacagagtcatcaccaccagcacccgaacctgggccctgcccacctacaacaaccatctgtacaagcaaatatccagccagtctggagccagcaacgacaatcactactttggctacagcaccccctgggggtattttgacttcaacagattccactgccacttttcaccacgtgactggcaaagactcatcaacaacaactggggattccgacccaagagactcaacttcaagctctttaacattcaagtcaaagaggtcacgcagaatgacggtacgacgacgattgccaataaccttaccagcacggttcaggtgtttactgactcggagtaccagctcccgtacgtcctcggctcggcgcatcaaggatgcctcccgccgttcccagcagacgtcttcatggtgccacagtatggatacctcaccctgaacaacgggagtcaggcagtaggacgctcttcattttactgcctagagtactttccttctcagatgctgcgtaccggaaacaactttaccttcagctacacctttgaggacgttcctttccacagcagctacgctcacagccagagtttggaccgtctcatgaatcctctcatcgaccagtacctgtattacttgagcagaacaaacactccaagcggaaccaccacgcagtccaggcttcagttttctcaggccggagcgagtgacattcaggaccagtctaggaactggcttcctggaccctgttaccgtcagcagcgagtatcaaagacatctgcggataacaacaacagtgaatactcgtggactggagctaccaagtaccacctcaatggcagagactctctggtgaatccgggcccggccatggccagccacaaagacgatgaagaaaagttttttcctcagagcggggttcttatctttgggaagcaaggctcagagaaaacaaatgtggatattgaaaaggtcatgattacagacgaagaggaaatcaggaccaccaatcccgtggctacggagcagtatggttctgtatctaccaacctccagagcggcaacacacaagcagctaccgcagatgtcaacacacaaggcgttcttccaggcatggtcgggcaagacagagacgtgtacctgcaggggcctacttgggcaaagattccacacacggacggacattttcacccctctcccctcatgggcggatttggacttaaacaccctcctccacagattctcatcaagaacaccccggtacctgcgaatccttcgaccaccttcagtgcggcaaagtttgcttccttcattacacagtactccacggggcaggtcagcgtggagatcgagtgggagctgcagaaggagaacagcaaacgctggaatcccgagatccagtacacttccaactacaacaagtctgttaatgtggactttactgtggacactaatggcgtgtattcagagcctcgccccattggcaccagatacctgactcgtaatctgtaa

SEQ ID NO: 238 - protein, 735 aa, Artificial Sequence
  source: /note="Description of Artificial Sequence: Synthetic polypeptide"
MAADGYLPDWLEDTLSEGIRQWWKLKPGPPPPKPAERHKDDSRGLVLPGYKYLGPFNGLDKGEPVNEADAAALEHDKAYDRQLDSGDNPYLKYNHADAEFQERLKEDTSFGGNLGRAVFQAKKRVLEPLSLVEEPVKTAPGKKRPVEHSPAEPDSSSGTGKSGNQPARKRLNFGQTGDSDSVPDPQPLGQPPAAPSGLGTNTMATGSGAPMADNNEGADGVGNSSGNWHCDSTWMGDRVITTSTRTWALPTYNNHLYKQISSQSGASNDNHYFGYSTPWGYFDFNRFHCHFSPRDWQRLINNNWGFRPKRLNFKLFNIQVKEVTQNDGTTTIANNLTSTVQVFTDSEYQLPYVLGSAHQGCLPPFPADVFMVPQYGYLTLNNGSQAVGRSSFYCLEYFPSQMLRTGNNFTFSYTFEDVPFHSSYAHSQSLDRLMNPLIDQYLYYLSRTNTPSGTTTQSRLQFSQAGASDIQDQSRNWLPGPCYRQQRVSKTSADNNNSEYSWTGATKYHLNGRDSLVNPGPAMASHKDDEEKFFPQSGVLIFGKQGSEKTNVDIEKVMITDEEEIRTTNPVATEQYGSVSTNLQSGNTQAATADVNTQGVLPGMVGQDRDVYLQGPTWAKIPHTDGHFHPSPLMGGFGLKHPPPQILIKNTPVPANPSTTFSAAKFASFITQYSTGQVSVEIEWELQKENSKRWNPEIQYTSNYNKSVNVDFTVDTNGVYSEPRPIGTRYLTRNL

SEQ ID NO: 239 - DNA, 2208 bp, Artificial Sequence
  source: /note="Description of Artificial Sequence: Synthetic polynucleotide"
atggctgccgatggttatcttccagattggctcgaggacactctctctgaaggaataagacagtggtggaagctcaaacctggcccaccaccaccaaagcccgcagagcggcataaggacgacagcaggggtcttgtgcttcctgggtacaagtacctcggacccttcaacggactcgacaagggagagccggtcaacgaggcagacgccgcggccctcgagcacgacaaggcctacgaccggcagctcgacagcggagacaacccgtacctcaagtacaaccacgccgacgcagagtttcaggagcgccttaaagaagatacgtcttttgggggcaacctcggacgagcagtcttccaggcaaaaaagagggttctggaacctctgggcctggttgaggagcctgttaagacggctccgggaaaaaagaggccggtagagcactctcctgcagagccagattcctcctccggaactggaaagtcgggcaaccagcctgcaagaaagagattgaatttcggtcagactggagactcagactccgtacctgacccccagcctctcggacagccaccagcagccccctctggtctgggaactaatacgatggctacaggcagtggcgcaccaatggcagacaataacgagggcgccgacggagtgggtaattcctcgggaaattggcattgcgattccacatggatgggcgacagagtcatcaccaccagcacccgaacctgggccctgcccacctacaacaaccatctgtacaagcaaatatccagccagtctggagccagcaacgacaatcactactttggctacagcaccccctgggggtattttgacttcaacagattccactgccacttttcaccacgtgactggcaaagactcatcaacaacaactggggattccgacccaagagactcaacttcaagctctttaacattcaagtcaaagaggtcacgcagaatgacggtacgacgacgattgccaataaccttaccagcacggttcaggtgtttactgactcggagtaccagctcccgtacgtcctcggctcggcgcatcaaggatgcctcccgccgttcccagcagacgtcttcatggtgccacagtatggatacctcaccctgaacaacgggagtcaggcagtaggacgctcttcattttactgcctagggtactttccttctcagatgctgcgtaccggaaacaactttaccttcagctacacctttgaggacgttcctttccacagcagctacgctcacagccagagtttggaccgtctcatgaatcctctcatcgaccagtacctgtattacttgagcagaacaaacactccaagcggaaccaccacgcagtccaggcttcagttttctcaggccggagcgagtgacattcgggaccagtctaggaactggcttcctggaccctgttaccgtcagcagcgagtatcaaagacatctgcggataacaacaacagtgaatactcgtggactggagctaccaagtaccacctcaatggcagagactctctggtgaatccgggcccggccatggccagccacaaagacgatgaagaaaagttttttcctcagagcggggttcttatctttgggaagcaaggcccagagaaaacaaatgtggatattgaaaaggtcatgattacagacgaagaggaaatcaggaccaccaatcccgtggctacggagcagtatggttctgtatctaccaacctccagagcggcaacacacaagcagctaccgcagatgtcaacacacaaggcgttcttccaggcatggtctggcaagacagagacgtgtacctgcaggggcctatttgggcaaagattccacacacggacggacattttcacccctctcccctcatgggcggatttggacttaaacaccctcctccacagattctcatcaagaacaccccggtacctgcgaatccttcgaccaccttcagtgcggcaaagtttgcttccttcattacacagtactccacggggcaggtcagcgtggagatcgagtgggagctgcagaaggagaacagcaaacgctggaatcccgagatccagtacacttccaactacaacaagtctgttaatgtggactttactgtggacactaatggcgtgtattcagagcctcgccccattggcaccagatacctgactcgtaatctgtaa

SEQ ID NO: 240 - protein, 735 aa, Artificial Sequence
  source: /note="Description of Artificial Sequence: Synthetic polypeptide"
MAADGYLPDWLEDTLSEGIRQWWKLKPGPPPPKPAERHKDDSRGLVLPGYKYLGPFNGLDKGEPVNEADAAALEHDKAYDRQLDSGDNPYLKYNHADAEFQERLKEDTSFGGNLGRAVFQAKKRVLEPLGLVEEPVKTAPGKKRPVEHSPAEPDSSSGTGKSGNQPARKRLNFGQTGDSDSVPDPQPLGQPPAAPSGLGTNTMATGSGAPMADNNEGADGVGNSSGNWHCDSTWMGDRVITTSTRTWALPTYNNHLYKQISSQSGASNDNHYFGYSTPWGYFDFNRFHCHFSPRDWQRLINNNWGFRPKRLNFKLFNIQVKEVTQNDGTTTIANNLTSTVQVFTDSEYQLPYVLGSAHQGCLPPFPADVFMVPQYGYLTLNNGSQAVGRSSFYCLGYFPSQMLRTGNNFTFSYTFEDVPFHSSYAHSQSLDRLMNPLIDQYLYYLSRTNTPSGTTTQSRLQFSQAGASDIRDQSRNWLPGPCYRQQRVSKTSADNNNSEYSWTGATKYHLNGRDSLVNPGPAMASHKDDEEKFFPQSGVLIFGKQGPEKTNVDIEKVMITDEEEIRTTNPVATEQYGSVSTNLQSGNTQAATADVNTQGVLPGMVWQDRDVYLQGPIWAKIPHTDGHFHPSPLMGGFGLKHPPPQILIKNTPVPANPSTTFSAAKFASFITQYSTGQVSVEIEWELQKENSKRWNPEIQYTSNYNKSVNVDFTVDTNGVYSEPRPIGTRYLTRNL

SEQ ID NO: 241 - protein, 735 aa, Artificial Sequence
  source: /note="Description of Artificial Sequence: Synthetic polypeptide"
MAADGYLPDWLEDTLSEGIRQWWKLKPGPPPPKPAERHKDDSRGLVLPGYKYLGPFNGLDKGEPVNEADAAALEHDKAYDRQLDSGDNPYLKYNHADAEFQERLKEDTSFGGNLGRAVFQAKKRVLEPLGLVEEPVKTAPGKKRPVEHSPAEPDSSSGTGKSGNQPARKRLNFGQTGDSDSVPDPQPLGQPPAAPSGLGTNTMATGSGAPMADNNEGADGVGNSSGNWHCDSTWMGDRVITTSTRTWALPTYNNHLYKQISSQSGASNDNHYFGYSTPWGYFDFNRFHCHFSPRDWQRLINNNWGFRPKRLNFKLFNIQVKEVTQNDGTTTIANNLTSTVQVFTDSEYQLPYVLGSAHQGCLPPFPADVFMVPQYGYLTLNNGSQAVGRSSFYCLEYFPSQMLRTGNNFTFSYTFEDVPFHSSYAHSQSLDRLMNPLIDQYLYYLSRTNTPSGTTTQSRLQFSQAGASDIRDQSRNWLPGPCYRQQRVSKTSADNNNSEYSWTGATKYHLNGRDSLVNPGPAMASHKDDEEKFFPQSGVLIFGKQGPEKTNVDIEKVMITDEEEIRTTNPVATEQYGSVSTNLQSGNTQAATADVNTQGVLPGMVWQDRDVYLQGPIWAKIPHTDGHFHPSPLMGGFGLKHPPPQILIKNTPVPANPSTTFSAAKFASFITQYSTGQVSVEIEWELQKENSKRWNPEIQYTSNYNKSVNVDFTVDTNGVYSEPRPIGTRYLTRNL

SEQ ID NO: 242 - protein, 735 aa, Artificial Sequence; identical to SEQ ID NO: 241
  source: /note="Description of Artificial Sequence: Synthetic polypeptide"

SEQ ID NO: 243 - DNA, 2211 bp, Artificial Sequence
  source: /note="Description of Artificial Sequence: Synthetic polynucleotide"
atggctgccgatggttatcttccagattggctcgaggacactctctctgaaggaataagacagtggtggaagctcaaacctggcccaccaccaccaaagcccgcagagcggcataaggacgacagcaggggtcttgtgcttcctgggtacaagtacctcggacccttcaacggactcgacaagggggagccggtcaacgaggcagacgccgcggccctcgagcacgacaaggcctacgaccggcagctcgacagcggagacaacccgtacctcaagtacaaccacgccgacgcagagtttcaggagcgccttaaagaagatacgtcttttgggggcaacctcggacgagcagtcttccaggcgaaaaagagggttcttgaacctctgcggcctggtttgaggaaacctgttaagacggctccgggaaaaaagaggccggtagagcactctcctgtggagccagactcctcctcgggaaccggaaaagcgggccagcagcctgcaagaaaaagattaaattttggtcagactggagacgcagactccgtacctgacccccagcctctcggacagccaccagcagccccctctggtctgggatctactacaatggctacaggcagtggcgcaccaatggcagacaataacgagggtgccgatggagtgggtaattcctcaggaaattggcattgcgattcccaatggctggacgacagagtcatcgccaccagcacccgaacctgggccctgcccacatacaacaaccacctctacaagcaaatctccagccaatcaggagcctgcaacgacaaccactactttggctacagcaccccctgggggtattttgacttcaacagattccactgccacttttcaccacgtgactggcaaagactcatcaacagcaactggggattccggcccaaaagactcaacttcaagctctttaatattcaagtcaaagaggtcacgcagaatgacggtacgacgacgattgccaataaccttaccagcacggttcaggtgtttactgactcggagtaccagctcccgtacgtcccgggctcggcgcatcaaggatgcctcccgccgtttccagcggacgtcttcatggtcccacagtatggatacctcaccctgaacaacgggagtcaggcggtaggacgctcttccttttactgcctggagtactttccttctcagatgctgcgtactggaaacaactttcagttcagctacacttttgaagacgtgcctttccacagcagctacgctcactgccagagtctggatcggctgatgaatcctctgatcgaccagtacctgtattatctgaacaagacacaaacaaatagtggaactcttcagcagtctcggctactgtttagccaagctggaccaaccaacatgtctcttcaagctaaaaactggctgcctggaccttgctacagacagcagcgtctgtcaaaacaggcaaacgacaataacaactgcaactttccctggactgcagctacaaagtatcatctaaatggccgggactcgttggttaatccaggaccagctatggccagtcacaaggatgacgaagaaaagtttttccccatgcatggaaccctgatatttggtaaacaaggaacaaatgccaacgacgcggatttggaaaatgtcatgattacagatgaagaagaaatcaggcccaccaatcccgtggctacggagcagtacgggactgtgtcaaataatttgcaaaactcaaacactggtccaactacaggaactgtcaatcaccaaggagcgttacctggtatggtgtggcaggatcgagacgtgtacctgcagggacccatttgggccaagattcctcacaccgatggacactttcatccttctccactgatgggaggttttggactcaaacacccgcctcctcagatcatgatcaaaagcactcccgttccagccaatcctcccacaaacttcagttctgccaagtttgcttcttccatcacacagtattccacgggacaggtcagcgtggagatcgagtgggagctgcagaaggagaacagcaaacgctggaatcccgaaattcagtacacttccaactacaacaagtctgttaatgtggactttactgtggacactaatggtgtgtattcagagcctcgccccattggcaccagatacctgactcgtaatctgtaa

SEQ ID NO: 244 - protein, 736 aa, Artificial Sequence
  source: /note="Description of Artificial Sequence: Synthetic polypeptide"
MAADGYLPDWLEDTLSEGIRQWWKLKPGPPPPKPAERHKDDSRGLVLPGYKYLGPFNGLDKGEPVNEADAAALEHDKAYDRQLDSGDNPYLKYNHADAEFQERLKEDTSFGGNLGRAVFQAKKRVLEPLRPGLRKPVKTAPGKKRPVEHSPVEPDSSSGTGKAGQQPARKRLNFGQTGDADSVPDPQPLGQPPAAPSGLGSTTMATGSGAPMADNNEGADGVGNSSGNWHCDSQWLDDRVIATSTRTWALPTYNNHLYKQISSQSGACNDNHYFGYSTPWGYFDFNRFHCHFSPRDWQRLINSNWGFRPKRLNFKLFNIQVKEVTQNDGTTTIANNLTSTVQVFTDSEYQLPYVPGSAHQGCLPPFPADVFMVPQYGYLTLNNGSQAVGRSSFYCLEYFPSQMLRTGNNFQFSYTFEDVPFHSSYAHCQSLDRLMNPLIDQYLYYLNKTQTNSGTLQQSRLLFSQAGPTNMSLQAKNWLPGPCYRQQRLSKQANDNNNCNFPWTAATKYHLNGRDSLVNPGPAMASHKDDEEKFFPMHGTLIFGKQGTNANDADLENVMITDEEEIRPTNPVATEQYGTVSNNLQNSNTGPTTGTVNHQGALPGMVWQDRDVYLQGPIWAKIPHTDGHFHPSPLMGGFGLKHPPPQIMIKSTPVPANPPTNFSSAKFASSITQYSTGQVSVEIEWELQKENSKRWNPEIQYTSNYNKSVNVDFTVDTNGVYSEPRPIGTRYLTRNL

SEQ ID NO: 245 - DNA, 2208 bp, Artificial Sequence
  source: /note="Description of Artificial Sequence: Synthetic polynucleotide"
atggctgccgatggttatcttccagattggctcgaggacactctctctgaaggaataagacagtggtggaagctcaaacctggcccaccaccaccaaagcccgcagagcggcataaggacgacagcaggggtcttgtgcttcctgggtacaagtacctcggacccttcaacggactcgacaagggagagccggtcaacgaggcagacgccgcggccctcgagcacgacaaggcctacgaccggcagctcgacagcggagacaacccgtacctcaagtacaaccacgccgacgcggagtttcaggagcgccttaaagaggatacgtcttttgggggcaacctcggacgagcagtcttccaggcaaaaaagagggttctggaacctctgggcctggttgaggagcctgttaagacggctccgggaaaaaagaggccggtagagcactctcctgcagagccagattcctcctccggaactggaaagtcgggcaaccagcctgcaagaaagagattgaatttcggtcagactggagactcagactccgtacctgacccccagcctctcggacagccaccagcagccccctctggtctgggaactaatacgatggctacaggcagtggcgcaccaatggcagacaataacgagggcgccgacggagtgggtaattcctcgggaaattggcattgcgattccacatggatgggcgacagagtcatcaccaccagcacccgaacctgggccctgcccacctacaacaaccatctgtacaagcaaatatccagccagtctggagccagcaacgacaatcactactttggctacagcaccccctgggggtattttgacttcaacagattccactgccacttttcaccacgtgactggcaaagactcatcaacaacaactggggattccgacccaagagactcaacttcaagctctttaacattcaagtcaaagaggtcacgcagaatgacggtacgacgacgattgccaataaccttaccagcacggttcaggtgtttactgactcggagtaccagctcccgtacgtcctcggctcggcgcatcaaggatgcctcccgccgttcccagcagacgtcttcatggtgccacagtatggatacctcaccctgaacaacgggagtcaggcagtaggacgctcttcattttactgcctagagtactttccttctcagatgctgcgtaccggaaacagctttaccttcagctacacctttgaggacgttcctttccacagcagctacgctcacagccagagtttggaccgtctcatgaatcctctcatcgaccagtacctgtattacttgagcagaacaaacactccaagcggaaccaccacgcagtccaggcttcagttttctcaggccggagcgagtgacattcgggaccagtctaggaactggcttcctggaccctgttaccgtcagcagcgagtatcaaagacatctgcggataacaacaacagtgaatactcgtggactggagctaccaagtaccacctcaatggcagagactctctggtgaatccgggcccggccatggccagccacaaagacgatgaagaaaagttctttcctcagagcggggttcttatctttgggaagcaaggctcagagaaaacaaatgtggatattgaaaaggtcatgattacagacgaagaggaaatcaggaccaccaatcccgtggctacggagcagtatggttctgtatctaccaacctccagagcggcaacacacaagcagctaccgcagatgtcaacacacaaggcgttcttccaggcatggtctggcaagacagagacgtgtacctgcaggggcctatttgggcaaagattccacacacggacggacattttcacccctctcccctcatgggcggatttggacttaaacaccctcctccacagattctcatcaagaacaccccggtacctgcgaatccttcgaccaccttcagtgcggcaaagtttgcttccttcattacacagtactccacggggcaggtcagcgtggagatcgagtgggagctgcagaaggagaacagcaaacgctggaatcccgagatccagtacacttccaactacaacaagtctgttaatgtggactttactgtggacactaatggcgtgtattcagagcctcgccccattggcaccagatacctgactcgtaatctgtaa

SEQ ID NO: 246 - protein, 735 aa, Artificial Sequence
  source: /note="Description of Artificial Sequence: Synthetic polypeptide"
MAADGYLPDWLEDTLSEGIRQWWKLKPGPPPPKPAERHKDDSRGLVLPGYKYLGPFNGLDKGEPVNEADAAALEHDKAYDRQLDSGDNPYLKYNHADAEFQERLKEDTSFGGNLGRAVFQAKKRVLEPLGLVEEPVKTAPGKKRPVEHSPAEPDSSSGTGKSGNQPARKRLNFGQTGDSDSVPDPQPLGQPPAAPSGLGTNTMATGSGAPMADNNEGADGVGNSSGNWHCDSTWMGDRVITTSTRTWALPTYNNHLYKQISSQSGASNDNHYFGYSTPWGYFDFNRFHCHFSPRDWQRLINNNWGFRPKRLNFKLFNIQVKEVTQNDGTTTIANNLTSTVQVFTDSEYQLPYVLGSAHQGCLPPFPADVFMVPQYGYLTLNNGSQAVGRSSFYCLEYFPSQMLRTGNSFTFSYTFEDVPFHSSYAHSQSLDRLMNPLIDQYLYYLSRTNTPSGTTTQSRLQFSQAGASDIRDQSRNWLPGPCYRQQRVSKTSADNNNSEYSWTGATKYHLNGRDSLVNPGPAMASHKDDEEKFFPQSGVLIFGKQGSEKTNVDIEKVMITDEEEIRTTNPVATEQYGSVSTNLQSGNTQAATADVNTQGVLPGMVWQDRDVYLQGPIWAKIPHTDGHFHPSPLMGGFGLKHPPPQILIKNTPVPANPSTTFSAAKFASFITQYSTGQVSVEIEWELQKENSKRWNPEIQYTSNYNKSVNVDFTVDTNGVYSEPRPIGTRYLTRNL

SEQ ID NO: 247 - DNA, 2211 bp, Artificial Sequence; identical to SEQ ID NO: 137
  source: /note="Description of Artificial Sequence: Synthetic polynucleotide"

SEQ ID NO: 248 - protein, 736 aa, Artificial Sequence
  source: /note="Description of Artificial Sequence: Synthetic polypeptide"
MAADGYLPDWLEDTLSEGIRQWWKLKPGPPPPKPAERHKDDSRGLVLPGYKYLGPGNGLDKGEPVNAADAAALEHDKAYDQQLKAGDNPYLKYNHADAEFQERLKEDTSFGGNLGRAVFQAKKRLLEPLGLVEEAAKTAPGKKRPVEQSPQEPDSSAGIGKSGSQPAKKKLNFGQTGDTESVPDPQPIGEPPAAPSGVGSLTMASGGGAPVADNNEGADGVGSSSGNWHCDSQWLGDRVITTSTRTWALPTYNNHLYKQISNSTSGGSSNDNAYFGYSTPWGYFDFNRFHCHFSPRDWQRLINNNWGFRPKRLNFKLFNIQVKEVTDNNGVKTIANNLTSTVQVFTDSDYQLPYVLGSAHEGCLPPFPADVFMIPQYGYLTLNDGGQAVGRSSFYCLEYFPSQMLRTGNNFQFSYEFENVPFHSSYAHSQSLDRLMNPLIDQYLYYLSKTINGSGQNQQTLKFSVAGPSNMAVQGRNYIPGPSYRQQRVSTTVTQNNNSEFAWPGASSWALNGRNSLMNPGPAMASHKEGEDRFFPLSGSLIFGKQGTGRDNVDADKVMITNEEEIKTTNPVATESYGQVATNHQSAQAQAQTGWVQNQGILPGMVWQDRDVYLQGPIWAKIPHTDGNFHPSPLMGGFGMKHPPPQILIKNTPVPADPPTAFNKDKLNSFITQYSTGQVSVEIEWELQKENSKRWNPEIQYTSNYYKSNNVEFAVSTEGVYSEPRPIGTRYLTRNL

SEQ ID NO: 249 - DNA, 2211 bp, Artificial Sequence
  source: /note="Description of Artificial Sequence: Synthetic polynucleotide"
atggctgccgatggttatcttccagattggctcgaggacactctctctgaaggaataagacagtggtggaagctcaaacctggcccaccaccaccaaagcccgcagagcggcataaggacgacagcaggggtcttgtgcttcctgggtacaagtacctcggacccggcaacggactcgacaagggggagccggtcaacgcagcagacgcggcggccctcgagcacgacaaggcctacgaccagcagctcaaggccggagacaacccgtacctcaagtacaaccacgccgacgccgagttccaggagcggctcaaagaagatacgtcttttgggggcaacctcgggcgagcagtcttccaggccaaaaagaggcttcttgaacctcttggtctggttgaggaagcggctaagacggctcctggaaagaagaggcctgtagagcagtctcctcaggaaccggactcctccgcgggtattggcaaatcgggttcacagcccgctaaaaagaaactcaatttcggtcagactggcgacacagagtcagtccccgaccctcaaccaatcggagaacctcccgcagccccctcaggtgtgggatctcttacaatggcttcaggtggtggcgcaccagtggcagacaataacgaaggtgccgatggagtgggtagttcctcgggaaattggcattgcgattcccaatggctgggggacagagtcatcaccaccagcacccgaacctgggccctgcccacctacaacaatcacctctacaagcaaatctccaacagcacatctggaggatcttcaaatgacaacgcctacttcggctacagcaccccctgggggtattttgacttcaacagattccactgccacttctcaccacgtgactggcagcgactcatcaacaacaactggggattccggcctaagcgactcaacttcaagctcttcaacattcaggtcaaagaggttacggacaacaatggagtcaagaccatcgccaataaccttaccagcacggtccaggtcttcacggactcagactatcagctcccgtacgtgctcgggtcggctcacgagggctgcctcccgccgttcccagcggacgttttcatgattcctcagtacgggtatctgacgcttaatgatgggagccaggccgtgggtcgttcgtccttttactgcctggaatatttcccgtcgcaaatgctaagaacgggtaacaacttccagttcagctacgagtttgagaacgtacctttccatagcagctacgctcacagccaaagcctggaccgactaatgaatccactcatcgaccaatacttgtactatctctcaaagactattaacggttctggacagaatcaacaaacgctaaaattcagcgtggccggacccagcaacatggctgtccagggaagaaactacatacctggacccagctaccgacaacaacgtgtctcaaccactgtgactcaaaacaacaacagcgaatttgcttggcctggagcttcttcttgggctctcaatggacgtaatagcttgatgaatcctggacctgctatggccagccacaaagaaggagaggaccgtttctttcctttgtctggatctttaatttttggcaaacaaggaactggaagagacaacgtggatgcggacaaagtcatgataaccaacgaagaagaaattaaaactactaacccggtagcaacggagtcctatggacaagtggccacaaaccaccagagtgcccaagcacaggcgcagaccggctgggttcaaaaccaaggaatacttccgggtatggtttggcaggacagagatgtgtacctgcaaggacccatttgggccaaaattcctcacacggacggcaactttcacccttctccgctaatgggagggtttggaatgaagcacccgcctcctcagatcctcatcaaaaacacacctgtacctgcggatcctccaacggctttcaataaggacaagctgaactctttcatcacccagtattctactggccaagtcagcgtggagattgagtgggagctgcagaaggaaaacagcaagcgctggaacccggagatccagtacacttccaactattacaagtctaataatgttgaatttgctgttaatactgaaggtgtatatagtgaaccccgccccattggcaccagatacctgactcgtaatctgtaa

SEQ ID NO: 250 - protein, 736 aa, Artificial Sequence
  source: /note="Description of Artificial Sequence: Synthetic polypeptide"
MAADGYLPDWLEDTLSEGIRQWWKLKPGPPPPKPAERHKDDSRGLVLPGYKYLGPGNGLDKGEPVNAADAAALEHDKAYDQQLKAGDNPYLKYNHADAEFQERLKEDTSFGGNLGRAVFQAKKRLLEPLGLVEEAAKTAPGKKRPVEQSPQEPDSSAGIGKSGSQPAKKKLNFGQTGDTESVPDPQPIGEPPAAPSGVGSLTMASGGGAPVADNNEGADGVGSSSGNWHCDSQWLGDRVITTSTRTWALPTYNNHLYKQISNSTSGGSSNDNAYFGYSTPWGYFDFNRFHCHFSPRDWQRLINNNWGFRPKRLNFKLFNIQVKEVTDNNGVKTIANNLTSTVQVFTDSDYQLPYVLGSAHEGCLPPFPADVFMIPQYGYLTLNDGSQAVGRSSFYCLEYFPSQMLRTGNNFQFSYEFENVPFHSSYAHSQSLDRLMNPLIDQYLYYLSKTINGSGQNQQTLKFSVAGPSNMAVQGRNYIPGPSYRQQRVSTTVTQNNNSEFAWPGASSWALNGRNSLMNPGPAMASHKEGEDRFFPLSGSLIFGKQGTGRDNVDADKVMITNEEEIKTTNPVATESYGQVATNHQSAQAQAQTGWVQNQGILPGMVWQDRDVYLQGPIWAKIPHTDGNFHPSPLMGGFGMKHPPPQILIKNTPVPADPPTAFNKDKLNSFITQYSTGQVSVEIEWELQKENSKRWNPEIQYTSNYYKSNNVEFAVNTEGVYSEPRPIGTRYLTRNL

SEQ ID NO: 251 - DNA, 2208 bp, Artificial Sequence
  source: /note="Description of Artificial Sequence: Synthetic polynucleotide"
atggctgccgatggttatcttccagattggctcgaggacactctctctgaaggaataagacagcggtggaagctcaaacctggcccaccaccaccagagcccgcagagcggcataaggacgacagcaggggtcttgtgcttcctgggtacaagtacctcggacccttcaacggactcgacaagggagagccggtcaacgaggcagacgccgcggccctcgagcacgacaaagcctacgaccggcagctcgacagcggagacaacccgtacctcaagtacaaccacgccgacgcggagtttcaggagcgccttaaagaagatacgtcttttgggggcaacctcggacgagcagtcttccaggcgaaaaagagggtacttgaacctctgggcctggttgaggaacctgttaagacggctccgggaaaaaagaggccggtagagcactctcctgtggagccagactcctcctcgggaaccggaaaggcgggccagcagcctgcaagaaaaagattgaattttggtcagactggagacgcagactcagtacctgacccccagcctctcggacagccaccagcagccccctctggtctgggaactaatacgatggctacaggcagtggcgcaccaatggcagacaataacgagggcgccgacggagtgggtaattcctcgggaaattggcattgcgattccacatggatgggcgacagagtcatcaccaccagcacccgaacctgggccctgcccacctacaacaaccacctctacaaacaaatttccagccaatcaggagcctcgaacgacaatcactactttggctacagcaccccttgggggtattttgacttcaacagattccactgccacttttcaccacgtgactggcaaagactcatcaacaacaactggggattccgacccaagagactcaacttcaagctctttaacattcaagtcaaagaggtcacgcagaatgacggtacgacgacgattgccaataaccttaccggcacggttcaggtgtttactgactcggagtaccagctcccgtacgtcctcggctcggcgcatcaaggatgcctcccgccgttcccagcagacgtcttcatggtgccacagtatggatacctcaccctgaacaacgggagtcaggcagtaggacgctcttcattttactgcctggagtactttccttctcagatgctgcgtaccggaaacaactttaccttcagctacacttttgaggacgttcctttccacagcagctacgctcacagccagagtctgggccgtctcatgaatcctctcatcgaccagtacctgtattacttgagcagaacaaacactccaagtggaaccaccacgcagtcaaggcttcagttttctcaggccggagcgagtgacattcgggaccagtctaggaactggcttcctggaccctgttaccgccagcagcgagtatcaaagacatctgcggataacaacaacagtgaatactcgtggactggagctaccaagtaccacctcaatggcagagactctctggtgaatccgggcccggccatggcaagccacaaggacgatgaagaaaagttttttcctcagagcggggttctcatctttgggaagcaaggctcagagaaaacaaatgtggacattgaaaaggtcatgattacagacgaagaggaaatcaggacaaccaatcccgtggctacggagcagtatggttctgtatctaccaacctccagagaggcaacagacaagcagctaccgcagatgtcaacacacaaggcgttcttccaggcatggtctggcaggacagagatgtgtaccttcaggggcccatctgggcaaagattccacacacggacggacattttcacccctctcccctcatgggtggattcggacttaaacaccctcctccacagattctcatcaagaacaccccggtacctgcgaatccttcgaccaccttcagtgcggcaaagtttgcttccttcatcacacagtactccacgggacaggtcagcgtggagatcgagtgggagctgcagaaggaaaacagcaaacgctggaatcccgaaattcagtacacttccaactacaacaagtctgttaatgtggactttactgtggacactaatggcgtgtattcagagcctcgccccattggcaccagatacctgactcgtaatctgtaa

SEQ ID NO: 252 - protein, 735 aa, Artificial Sequence
  source: /note="Description of Artificial Sequence: Synthetic polypeptide"
MAADGYLPDWLEDTLSEGIRQRWKLKPGPPPPEPAERHKDDSRGLVLPGYKYLGPFNGLDKGEPVNEADAAALEHDKAYDRQLDSGDNPYLKYNHADAEFQERLKEDTSFGGNLGRAVFQAKKRVLEPLGLVEEPVKTAPGKKRPVEHSPVEPDSSSGTGKAGQQPARKRLNFGQTGDADSVPDPQPLGQPPAAPSGLGTNTMATGSGAPMADNNEGADGVGNSSGNWHCDSTWMGDRVITTSTRTWALPTYNNHLYKQISSQSGASNDNHYFGYSTPWGYFDFNRFHCHFSPRDWQRLINNNWGFRPKRLNFKLFNIQVKEVTQNDGTTTIANNLTGTVQVFTDSEYQLPYVLGSAHQGCLPPFPADVFMVPQYGYLTLNNGSQAVGRSSFYCLEYFPSQMLRTGNNFTFSYTFEDVPFHSSYAHSQSLGRLMNPLIDQYLYYLSRTNTPSGTTTQSRLQFSQAGASDIRDQSRNWLPGPCYRQQRVSKTSADNNNSEYSWTGATKYHLNGRDSLVNPGPAMASHKDDEEKFFPQSGVLIFGKQGSEKTNVDIEKVMITDEEEIRTTNPVATEQYGSVSTNLQRGNRQAATADVNTQGVLPGMVWQDRDVYLQGPIWAKIPHTDGHFHPSPLMGGFGLKHPPPQILIKNTPVPANPSTTFSAAKFASFITQYSTGQVSVEIEWELQKENSKRWNPEIQYTSNYNKSVNVDFTVDTNGVYSEPRPIGTRYLTRNL

SEQ ID NO: 253 - DNA, 2208 bp, Artificial Sequence
  source: /note="Description of Artificial Sequence: Synthetic polynucleotide"
atggctgccgatggttatcttccagattggctcgaggacactctctctgaaggaataagacagcggtggaagctcaaacctggcccaccaccaccagagcccgcagagcggcataaggacgacagcaggggtcttgtgcttcctgggtacaagtacctcggacccttcaacggactcgacaagggagagccggtcaacgaggcagacgccgcggccctcgagcacgacaaagcctacgaccggcagctcgacagcggagacaacccgtacctcaagtacaaccacgccgacgcggagtttcaggagcgccttaaagaagatacgtcctttgggggcaacctcggacgagcagtcttccaggcgaaaaagagggtacttgaacctctgggcctggttgaggaacctgttaagacggctccgggaaaaaagaggccggtagagcactctcctgtggagccagactcctcctcgggaaccggaaaggcgggccagcagcctgcaagaaaaagattgaattttggtcagactggagacgcagactcagtacctgacccccagcctctcggacagccaccagcagccccctctggtctgggaactaatacgatggctacaggcagtggcgcaccaatggcagacaataacgagggcgccgacggagtgggtaattcctcgggaaattggcattgcgattccacatggatgggcgacagagtcatcaccaccagcacccgaacctgggccctgcccacctacaacaaccacctctacaaacaaatttccagccaatcaggagcctcgaacgacaatcactactttggctacagcaccccttgggggtattttgacttcaacagattccactgccacttttcaccacgtgactggcaaagactcatcaacaacaactggggattccgacccaagagactcaacttcaagctctttaacattcaagtcaaagaggtcacgcagaatgacggtacgacgacgattgccaataaccttaccagcacggttcaggtgtttactgactcggagtaccagctcccgtacgtcctcggctcggcgcatcaaggatgcctcccgccgttcccagcagacgtcttcatggtgccacagtatggatacctcaccctgaacaacgagagtcaggcagtaggacgctcttcattttactgcctggagtactttccttctcagatgctgcgtaccggaaacaactttaccttcagctacacttttgaggacgttcctttccacagcagctacgctcacagccagagtctgggccgtctcatgaatcctctcatcgaccagtacctgtattacttgagcagaacaaacactccaagtggaaccaccacgcagtcaaggcttcagttttctcaggccggagcgagtgacattcgggaccagtctaggaactggcttcctggaccctgttaccgccagcagcgagtatcaaagacatctgcggataacaacaacagtgaatactcgtggactggagctaccaagtaccacctcaatggcagagactctctggtgaatccgggcccggccatggcaagccacaaggacgatgaagaaaagttttttcctcagagcggggttctcatctttgggaagcaaggctcagagaaaacaaatgtggacattgaaaaggtcatgattacagacgaagaggaaatcaggacaaccaatcccgtggctacggagcagtatggttctgtatctaccaacctccagagaggcaacagacaagcagctaccgcagatgtcaacacacaaggcgttcttccaggcatggtctggcaggacagagatgtgtaccttcaggggcccatctgggcaaagattccacacacggacggacattttcacccctctcccctcatgggtggattcggacttaaacaccctcctccacagattctcatcaagaacaccccggtacctgcgaatccttcgaccaccttcagtgcggcaaagtttgcttccttcatcacacagtactccacgggacaggtcagcgtggagatcgagtgggagctgcagaaggaaaacagcaaacgctggaatcccgaaattcagtacacttccaactacaacaagtctgttaatgtggactttactgtggacactaatggcgtgtattcagagcctcgccccattggcaccagatacctgactcgtaatctgtaa

SEQ ID NO: 254 - protein, 735 aa, Artificial Sequence
  source: /note="Description of Artificial Sequence: Synthetic polypeptide"
MAADGYLPDWLEDTLSEGIRQRWKLKPGPPPPEPAERHKDDSRGLVLPGYKYLGPFNGLDKGEPVNEADAAALEHDKAYDRQLDSGDNPYLKYNHADAEFQERLKEDTSFGGNLGRAVFQAKKRVLEPLGLVEEPVKTAPGKKRPVEHSPVEPDSSSGTGKAGQQPARKRLNFGQTGDADSVPDPQPLGQPPAAPSGLGTNTMATGSGAPMADNNEGADGVGNSSGNWHCDSTWMGDRVITTSTRTWALPTYNNHLYKQISSQSGASNDNHYFGYSTPWGYFDFNRFHCHFSPRDWQRLINNNWGFRPKRLNFKLFNIQVKEVTQNDGTTTIANNLTSTVQVFTDSEYQLPYVLGSAHQGCLPPFPADVFMVPQYGYLTLNNESQAVGRSSFYCLEYFPSQMLRTGNNFTFSYTFEDVPFHSSYAHSQSLGRLMNPLIDQYLYYLSRTNTPSGTTTQSRLQFSQAGASDIRDQSRNWLPGPCYRQQRVSKTSADNNNSEYSWTGATKYHLNGRDSLVNPGPAMASHKDDEEKFFPQSGVLIFGKQGSEKTNVDIEKVMITDEEEIRTTNPVATEQYGSVSTNLQRGNRQAATADVNTQGVLPGMVWQDRDVYLQGPIWAKIPHTDGHFHPSPLMGGFGLKHPPPQILIKNTPVPANPSTTFSAAKFASFITQYSTGQVSVEIEWELQKENSKRWNPEIQYTSNYNKSVNVDFTVDTNGVYSEPRPIGTRYLTRNL

SEQ ID NO: 255 - DNA, 2208 bp, Artificial Sequence
  source: /note="Description of Artificial Sequence: Synthetic polynucleotide"
atggctgccgatggttatcttccagattggctcgaggacactctctctgaaggaataagacagcggtggaagctcaaacctggcccaccaccaccagagcccgcagagcggcataaggacgacagcaggggtcttgtgcttcctgggtacaagtacctcggacccttcaacggactcgacaagggagagccggtcaacgaggcagacgccgcggccctcgagcacgacaaagcctacgaccggcagctcgacagcggagacaacccgtacctcaagtacaaccacgccgacgcggagtttcaggagcgccttaaagaagatacgtcttttgggggcaacctcggacgagcagtcttccaggcgaaaaagagggtacttgaacctctgggcctggttgaggaacctgttaagacggctccgggaaaaaagaggccggtagagcactctcctgtggagccagactcctcctcgggaaccggaaaggcgggccagcagcctgcaagaaaaagattgaattttggtcagactggagacgcagactcagtacctgacccccagcctctcggacagccaccagcagccccctctggtctgggaactaatacgatggctacaggcagtggcgcaccaatggcagacaataacgagggcgccgacggagtgggtaattcctcgggaaattggcattgcgattccacatggatgggcgacagagtcatcaccaccagcacccgaacctgggccctgcccacctacaacaaccacctctacaaacaaatttccagccaatcaggagcctcgaacgacaatcactactttggctacagcaccccttgggggtattttgacttcaacagattccactgccacttttcaccacgtgactggcaaagactcatcaacaacaactggggattccgacccaagagactcaacttcaagctctttaacattcaagtcaaagaggtcacgcagaatgacggtacgacgacgattgccaataaccttaccagcacggttcaggtgtttactgactcggagtaccagctcccgtacgtcctcggctcggcgcatcaaggatgcctcccgccgttcccagcagacgtcttcatggtaccacagtatggatacctcaccctgaacaacgggagtcaggcagtaggacgctcttcattttactgcctggagtactttccttctcagatgctgcgtaccggaaacaactttaccttcagctacacttttgaggacgttcctttccacagcagctacgctcacagccagagtctgggccgtctcatgaatcctctcatcgaccagtacctgtattacttgagcagaacaaacactccaagtggaaccaccacgcagtcaaggcttcagttttctcaggccggagcgagtgacattcgggaccagtctaggaactggcttcctggaccctgttaccgccagcagcgagtatcaaagacatctgcggataacaacaacagtgaatactcgtggactggagctaccaagtaccacctcaatggcagagactctctggtgaatccgggcccggccatggcaagccacaaggacgatgaagaaaagttttttcctcagagcggggttctcatctttgggaagcaaggctcagagaaaacaaatgtggacattgaaaaggtcatgattacagacgaagaggaaatcaggacaaccaatcccgtggctacggagcagtatggttctgtatctaccaacctccagagaggcaacagacaagcagctaccgcagatgtcaacacacaaggcgttcttccaggcatggtctggcaggacagagatgtgtaccttcaggggcccatctgggcaaagattccacacacggacggacattttcacccctctcccctcatgggtggattcggacttaaacaccctcctccacagattctcatcaagaacaccccggtacctgcgaatccttcgaccaccttcagtgcggcaaagtttgcttccttcatcacacagtactccacgggacaggtcagcgtggagatcgagtgggagctgcagaaggaaaacagcaaacgctggaatcccgaaattcagtacacttccaactacaacaagtctgttaatgtggactttactgtggacactaatggcgtgtattcagagcctcgccccattggcaccagatacctgactcgtaatctgtaa

SEQ ID NO: 256 - protein, 735 aa, Artificial Sequence
  source: /note="Description of Artificial Sequence: Synthetic polypeptide"
MAADGYLPDWLEDTLSEGIRQRWKLKPGPPPPEPAERHKDDSRGLVLPGYKYLGPFNGLDKGEPVNEADAAALEHDKAYDRQLDSGDNPYLKYNHADAEFQERLKEDTSFGGNLGRAVFQAKKRVLEPLGLVEEPVKTAPGKKRPVEHSPVEPDSSSGTGKAGQQPARKRLNFGQTGDADSVPDPQPLGQPPAAPSGLGTNTMATGSGAPMADNNEGADGVGNSSGNWHCDSTWMGDRVITTSTRTWALPTYNNHLYKQISSQSGASNDNHYFGYSTPWGYFDFNRFHCHFSPRDWQRLINNNWGFRPKRLNFKLFNIQVKEVTQNDGTTTIANNLTSTVQVFTDSEYQLPYVLGSAHQGCLPPFPADVFMVPQYGYLTLNNGSQAVGRSSFYCLEYFPSQMLRTGNNFTFSYTFEDVPFHSSYAHSQSLGRLMNPLIDQYLYYLSRTNTPSGTTTQSRLQFSQAGASDIRDQSRNWLPGPCYRQQRVSKTSADNNNSEYSWTGATKYHLNGRDSLVNPGPAMASHKDDEEKFFPQSGVLIFGKQGSEKTNVDIEKVMITDEEEIRTTNPVATEQYGSVSTNLQRGNRQAATADVNTQGVLPGMVWQDRDVYLQGPIWAKIPHTDGHFHPSPLMGGFGLKHPPPQILIKNTPVPANPSTTFSAAKFASFITQYSTGQVSVEIEWELQKENSKRWNPEIQYTSNYNKSVNVDFTVDTNGVYSEPRPIGTRYLTRNL

SEQ ID NO: 257 - DNA, 2208 bp, Artificial Sequence
  source: /note="Description of Artificial Sequence: Synthetic polynucleotide"
atggctgccgatggttatcttccagattggctcgaggacactctctctgaaggaataagacagcggtggaagctcaaacctggcccaccaccaccagagcccgcagagcggcataaggacgacagcaggggtcttgtgcttcctgggtacaagtacctcggacccttcaacggactcgacaagggagagccggtcaacgaggcagacgccgcggccctcgagcacgacaaagcctacgaccggcagctcgacagcggagacaacccgtacctcaagtacaaccacgccgacgcggagtttcaggagcgccttaaagaagatacgtcttttgggggcaacctcggacgagcagtcttccaggcgaaaaagagggtactcgaacctctgggcctggttgaggaacctgttaagacggctccgggaaaaaagaggccggtagagcactctcctgtggagccagactcctcctcgggaaccggaaaggcgggccagcagcctgcaagaaaaagattgaattttggtcagactggagacgcagactcagtacctgacccccagcctctcggacagccaccagcagccccctctggtctgggaactaatacgatggctacaggcagtggcgcaccaatggcagacaataacgagggcgccgacggagtgggtaattcctcgggaaattggcattgcgattccacatggatgggcgacagagtcatcaccaccagcacccgaacctgggccctgcccacctacaacaaccacctctacaaacaaatttccagccaatcaggagcctcgaacgacaatcactactttggctacagcaccccttgggggtattttgacttcaacagattccactgccacttttcaccacgtgactggcaaagactcatcaacaacaactggggattccgacccaagagactcaacttcaagctctttaacattcaagtcaaagaggtcacgcagaatgacggtacgacgacgattgccaataaccttaccagcacggttcaggtgtttactgactcggagtaccagctcccgtacgtcctcggctcggcgcatcaaggatgcctcccgccgttcccagcagacgtcttcatggtgccacagtatggatacctcaccctgaacaacgggagtcaggcagcaggacgctcttcattttactgcctggagtactttccttctcagatgctgcgtaccggaaacaactttaccttcagctacacttttgaggacgttcctttccacagcagctacgctcacagccagagtctgggccgtctcatgaatcctctcatcgaccagtacctgtattacttgagcagaacaaacactccaagtggaaccaccacgcagtcaaggcttcagttttctcaggccggagcgagtgacattcgggaccagtctaggaactggcttcctggaccctgttaccgccagcagcgagtatcaaagacatctgcggataacaacaacagtgaatactcgtggactggagctaccaagtaccacctcaatggcagagactctctggtgaatccgggcccggccatggcaagccacaaggacgatgaagaaaagttttttcctcagagcggggttctcatctttgggaagcaaggctcagagaaaacaaatgtggacattgaaaaggtcatgattacagacgaagaggaaatcaggacaaccaatcccgtggctacggagcagtatggttctgtatctaccaacctccagagaggcaacagacaagcagctaccgcagatgtcaacacacaaggcgttcttccaggcatggtctggcaggacagagatgtgtaccttcaggggcccatctgggcaaagattccacacacggacggacattttcacccctctcccctcatgggtggattcggacttaaacaccctcctccacagattctcatcaagaacaccccggtacctgcgaatccttcgaccaccttcagtgcggcaaagtttgcttccttcatcacacagtactccacgggacaggtcagcgtggagatcgagtgggagctgcagaaggaaaacagcaaacgctggaatcccgaaattcagtacacttccaactacaacaagtccgttaatgtggactttactgtggacactaatggcgtgtattcagagcctcgccccattggcaccagatacctgactcgtaatctgtaa

SEQ ID NO: 258 - protein, 735 aa, Artificial Sequence
  source: /note="Description of Artificial Sequence: Synthetic polypeptide"
MAADGYLPDWLEDTLSEGIRQRWKLKPGPPPPEPAERHKDDSRGLVLPGYKYLGPFNGLDKGEPVNEADAAALEHDKAYDRQLDSGDNPYLKYNHADAEFQERLKEDTSFGGNLGRAVFQAKKRVLEPLGLVEEPVKTAPGKKRPVEHSPVEPDSSSGTGKAGQQPARKRLNFGQTGDADSVPDPQPLGQPPAAPSGLGTNTMATGSGAPMADNNEGADGVGNSSGNWHCDSTWMGDRVITTSTRTWALPTYNNHLYKQISSQSGASNDNHYFGYSTPWGYFDFNRFHCHFSPRDWQRLINNNWGFRPKRLNFKLFNIQVKEVTQNDGTTTIANNLTSTVQVFTDSEYQLPYVLGSAHQGCLPPFPADVFMVPQYGYLTLNNGSQAAGRSSFYCLEYFPSQMLRTGNNFTFSYTFEDVPFHSSYAHSQSLGRLMNPLIDQYLYYLSRTNTPSGTTTQSRLQFSQAGASDIRDQSRNWLPGPCYRQQRVSKTSADNNNSEYSWTGATKYHLNGRDSLVNPGPAMASHKDDEEKFFPQSGVLIFGKQGSEKTNVDIEKVMITDEEEIRTTNPVATEQYGSVSTNLQRGNRQAATADVNTQGVLPGMVWQDRDVYLQGPIWAKIPHTDGHFHPSPLMGGFGLKHPPPQILIKNTPVPANPSTTFSAAKFASFITQYSTGQVSVEIEWELQKENSKRWNPEIQYTSNYNKSVNVDFTVDTNGVYSEPRPIGTRYLTRNL

SEQ ID NO: 259 - protein, 738 aa, Artificial Sequence; identical to SEQ ID NO: 101
  source: /note="Description of Artificial Sequence: Synthetic polypeptide"

SEQ ID NO: 260 - DNA, 2217 bp, Artificial Sequence
  source: /note="Description of Artificial Sequence: Synthetic polynucleotide"
atggctgctgacggttatcttccagattggctcgaggacaacctctctgagggcattcgcgagtggtgggacctgaaacctggagcccccaagcccaaggccaaccagcagaagcaggacgacggccggggtctggtgcttcctggctacaagtacctcggacccttcaacggactcgacaagggggagcccgtcaacgcggcggacgcagcggccctcgagcacgacaaggcctacgaccagcagctcaaagcgggtgacaatccgtacctgcggtataaccacgccgacgccgagtttcaggagcgtctgcaagaagatacgtcttttgggggcaacctcgggcgagcagtcttccaggccaagaagcgggttctcgaacctctcggtctggttgaggaagctgctaagacggctcctggaaagaagagaccggtagaaccgtcacctcagcgttcccccgactcctccacgggcatcggcaagaaaggccagcagcccgctaaaaagagactgaactttggtcagactggcgactcagagtcagtccccgaccctcaaccaatcggagaaccaccagcaggcccctctggtctgggatctggtacaatggctgcaggcggtggcgctccaatggcagacaataacgaaggcgccgacggagtgggtagttcctcaggaaattggcattgcgattccacatggctgggcgacagagtcatcaccaccagcacccgaacctgggccctgcccacctacaacaaccacctctacaagcaaatatccaatgggacatcgggaggaagcaccaacgacaacacctacttcggctacagcaccccctgggggtattttgacttcaacagattccactgccacttctcaccacgtgactggcagcgactcatcaacaacaactggggattccggccaaaaagactcagcttcaagctcttcaacatccaggtcaaggaggtcacgcagaatgaaggcaccaagaccatcgccaataaccttaccagcacgattcaggtatttacggactcggaataccagctgccgtacgtcctcggctccgcgcaccagggctgcctgcctccgttcccggcggacgtcttcatgattccccagtacggctaccttacactgaacaatggaagtcaagccgtaggccgttcctccttctactgcctggaatattttccatctcaaatgctgcgaactggaaacaattttgaattcagctacaccttcgaggacgtgcctttccacagcagctacgcacacagccagagcttggaccgactgatgaatcctctcatcgaccagtacctgtactacttatccagaactcagtccacaggaggaactcaaggtacccagcaattgttattttctcaagctgggcctgcaaacatgtcggctcaggctaagaactggctacctggaccttgctaccggcagcagcgagtctctacgacactgtcgcaaaacaacaacagcaactttgcttggactggtgccaccaaatatcacctgaacggaagagactctttggtaaatcccggtgtcgccatggcaacccacaaggacgacgaggaacgcttcttcccgtcgagtggagtcctgatgttcggaaaacagggtgctggaagagacaatgtggactacagcagcgttatgctaaccagcgaagaagaaattaaaaccactaaccccgtagccacagaacaatacggtgtggtggctgacaacttgcagcaaaccaatacagggcctattgtgggaaatgtcaacagccaaggagccttacctggcatggtctggcagaaccgagacgtgtacctgcagggtcccatctgggccaagattcctcacacggacggcaacttccacccttcaccgctaatgggaggatttggactgaagcacccacctcctcagatcctgatcaagaacacgccggtacctgcggatcctccaacaacgttcagccaggcgaaattggcttccttcattacgcagtacagcaccggacaggtcagcgtggaaatcgagtgggagctgcagaaggagaacagcaaacgctggaacccagagattcagtacacttcaaactactacaaatctacaaatgtggactttgctgtcaatacagagggaacttattctgagcctcgccccattggtactcgttacctcacccgtaatctgtaa

SEQ ID NO: 261 - protein, 738 aa, Artificial Sequence
  source: /note="Description of Artificial Sequence: Synthetic polypeptide"
MAADGYLPDWLEDNLSEGIREWWDLKPGAPKPKANQQKQDDGRGLVLPGYKYLGPFNGLDKGEPVNAADAAALEHDKAYDQQLKAGDNPYLRYNHADAEFQERLQEDTSFGGNLGRAVFQAKKRVLEPLGLVEEAAKTAPGKKRPVEPSPQRSPDSSTGIGKKGQQPAKKRLNFGQTGDSESVPDPQPIGEPPAGPSGLGSGTMAAGGGAPMADNNEGADGVGSSSGNWHCDSTWLGDRVITTSTRTWALPTYNNHLYKQISNGTSGGSTNDNTYFGYSTPWGYFDFNRFHCHFSPRDWQRLINNNWGFRPKRLSFKLFNIQVKEVTQNEGTKTIANNLTSTIQVFTDSEYQLPYVLGSAHQGCLPPFPADVFMIPQYGYLTLNNGSQAVGRSSFYCLEYFPSQMLRTGNNFEFSYTFEDVPFHSSYAHSQSLDRLMNPLIDQYLYYLSRTQSTGGTQGTQQLLFSQAGPANMSAQAKNWLPGPCYRQQRVSTTLSQNNNSNFAWTGATKYHLNGRDSLVNPGVAMATHKDDEERFFPSSGVLMFGKQGAGRDNVDYSSVMLTSEEEIKTTNPVATEQYGVVADNLQQTNTGPIVGNVNSQGALPGMVWQNRDVYLQGPIWAKIPHTDGNCHPSPLMGGFGLKHPPPQILIKNTPVPADPPTTFSQAKLASFITQYSTGQVSVEIEWELQKENSKRWNPEIQYTSNYYKSTNVDFAVNTEGTYSEPRPIGTRYLTRNL

SEQ ID NO: 262 - protein, 738 aa, Artificial Sequence
  source: /note="Description of Artificial Sequence: Synthetic polypeptide"
MAADGYLPDWLEDNLSEGIREWWDLKPGAPKPKANQQKQDDGRGLVLPGYKYLGPFNGLDKGEPVNAADAAALEHDKAYDQQLKAGDNPYLRYNHADAEFQERLQEDTSFGGNLGRAVFQAKKRVLEPLGLVEEGAKTAPGKKRPVEPSPQRSPDSSTGIGKKGQQPARKRLNFGRTGDSESVPDPQPIGEPPAAPSSVGSGTMAAGGGAPMADNNEGADGVGSSSGNWHCDSTWLGDRVITTSTRTWALPTYNNHLYKQISNGTSGGSTNDNTYFGYSTPWGYLDFNRFHCHFSPRDWQRLINNNWGFRPKRLSFKLFNIQVKEVTQNEGTKTIANNLASTIQVFTDSEYQPPYVLGSAHQGCLPPFPADVFMIPQYGYLTLNNGSQAVGRSSFYCLEYFPSQMLRTGNNFSFSYTFEDVPFHSSYAHSQSLDRLMNPLIDQYLYYLSRTQSTGGTAGTQQLLFSRAGPSNMSAQARNWLPGPCYRQQRVSTTLSQNNNSNFAWTGATKYHLNGRDSLVNPGVAMATNKDDEDRFFPSSGILMFGKQGAGKDNVDYSNVMLTSEEEIKTTNPVATEQYGVVADNLQQQNTAPTVGAVNSQGALPGMVWQNRDVYLQGPIWAKIPHTDGNFHPSPLMGGFGLKHPPPQILIKNTPVPADPPTAFNQAKLNSFIAQYSTGQVSVEIEWELQKENSKRWNPEIQYTSNYYKSTNADFAVNTEGVYSEPRPIGTRYLTRNL

SEQ ID NO: 263 - DNA, 2217 bp, Artificial Sequence
  source: /note="Description of Artificial Sequence: Synthetic polynucleotide"
atggctgccgatggttatcttccagattggctcgaggacaacctctctgagggcattcgcgagtggtgggacctgaaacctggagccccgaaacccaaagccaaccagcaaaagcaggacgacggccggggtctggtgcttcctggctacaagtacctcggacccttcaacggactcgacaagggggagcccgtcaacgcggcggacgcagcggccctcgagcacgacaaggcctacgaccagcagctcaaagcgggtgacaatccgtacctgcggtataatcacgccgacgccgagtttcaggagcgtctgcaagaagatacgtcttttgggggcaacctcgggcgagcagtcttccaggccaagaagcgggttctcgaacctctcggtctggttgaggaaggcgctaagacggctcctggaaagaagagaccggtagagccgtcaccacagcgttcccccgactcctccacgggcatcggcaagaaaggccagcagcccgccagaaagagactcaatttcggtcggactggcgactcagagtcagtccccgaccctcaacctatcggagaacctccagcagcgccctctagtgtgggatctggtacaatggctgcaggcggtggcgcaccaatggcagacaataacgaaggtgccgacggagtgggtagttcctcgggaaattggcattgcgattccacatggctgggcgacagagttatcaccaccagcacccgaacctgggccctgcccacctacaacaaccacctctacaagcaaatctccaacgggacctcgggaggcagcaccaacgacaacacctactttggctacagcaccccctgggggtatcttgactttaacagattccactgccacttctcaccacgtgactggcagcgactcatcaacaacaactggggattccggcccaagagactcagcttcaagctcttcaacatccaggtcaaagaggtcacgcagaatgaaggcaccaagaccatcgccaataacctcgccagcaccatccaggtgtttacggactcggaataccagccgccgtacgtcctcggctctgcccaccagggctgcctgcctccgttcccggcggacgtcttcatgattcctcagtacggctacctgactctcaacaacggtagtcaggccgtgggacgttcctccttctactgcctggagtacttcccctctcagatgctgagaacgggcaacaacttttccttcagctacactttcgaggacgtgcctttccacagcagctacgcgcacagccagagtttggacaggctgatgaatcctctcatcgaccagtacctgtactacctgtcaagaacccagtctacgggaggcacagcgggaacccagcagttgctgttttctcgggccgggcctagcaacatgtcggctcaggccagaaactggctgcctggaccctgctacagacagcagcgcgtctccacgacactgtcgcaaaacaacaacagcaactttgcctggactggtgccaccaagtatcatctgaacggcagagactctctggtgaatccgggcgtcgccatggcaaccaacaaggacgacgaggaccgcttcttcccatccagcggcatcctcatgtttggcaagcagggagctggaaaagacaacgtggactatagcaacgtgatgctaaccagcgaggaagaaatcaagaccaccaaccccgtggccacagaacagtatggcgtggtggctgataacctacagcagcaaaacaccgctcctactgtgggggccgtcaacagccagggagccttacctggcatggtctggcagaaccgggacgtgtacctgcagggtcctatttgggccaagattcctcacacagatggcaactttcacccgtctcctttaatgggcggctttggacttaaacatccgcctcctcagatcctcatcaaaaacactcctgttcctgcggatcctccaacagcgttcaaccaggccaagctgaattctttcatcgcgcagtacagcaccggacaagtcagcgtggagatcgagtgggagctgcagaaggagaacagcaagcgctggaacccagagattcagtatacttccaactactacaaatctacaaatgcggactttgctgttaatactgagggtgtttactctgagcctcgccccattggcactcgttacctcacccgtaatctgtaa

SEQ ID NO: 264 - DNA, 2208 bp, Artificial Sequence
  source: /note="Description of Artificial Sequence: Synthetic polynucleotide"
atggctgccgatggttatcttccagattggctcgaggacactctctctgaaggaataagacagtggtggaagctcaaacctggcccaccaccaccaaagcccgcagagcggcataaggacgacagcaggggtcttgtgcttcctgggtacaagtacctcggacccttcaacggactcgacaagggggagccggtcaacgaggcagacgccgcggccctcgagcacgacaaggcctacgaccggcagctcgacagcggagacaacccgtacctcaagtacaaccacgccgacgcagagtttcaggagcgccttaaagaagatacgtcttttgggggcaacctcggacgagcagtcttccaggcgaaaaagagggttcttgaacctctgggcctggttgaggagcctgttaagacggctccgggaaaaaagaggccggtagagcactctcctgtggagccagactcctcctcgggaaccggaaaagcgggccagcagcctgcaagaaaaagattaaattttggtcagactggagacgcagactccgtacctgacccccagcctctcggacagccaccagcagccccctctggtctgggatctactacaatggctacaggcagtggcgcaccaatggcagacaataacgagggtgccgatggagtgggtaattcctcaggaaattggcattgcgattcccaatggctgggcgacagagtcatcaccaccagcacccgaacctgggccctgcccacatacaacaaccacctctacaagcaaatctccagccaatcaggagccagcaacgacaaccactactttggctacagcaccccctgggggtattttgacttcaacagattccactgccacttttcaccacgtgactggcaaagactcgtcaacaacaaccggggattccggcccaaaagactcaacttcaagctctttaatattcaagtcaaagaggtcacgcagaatgacggtacgacgacgattgccaataaccttaccagcacggttcaggtgtttactgactcggagtaccagctcccgtacgtcctgggctcggcgcatcaaggatgcctcccgccgtttccagcggacgtcttcatggtcccacagtatggatacctcaccctgaacaacgggagtcaggcggtaggacgctcttccttttactgcctggagtactttccttctcagatgctgcgtactggaaacaactttcagttcagctacacttttgaagacgtgcctttccacagcagctacgctcacagccagagtctggatcggctgatgaatcctctgatcgaccagtacctgtattatctgaacaagacacaaacaaatagtggaactcttcagcagtctcggctactgtttagccaagctggaccaaccaacatgtctcttcaagctaaaaactggctgcctggaccttgctacagacagcagcgtctgtcaaaacaggcaaacgacaacaacaacagcaactttccctggactgcagctacaaagtatcatctaaatggccgggactcgttggttaatccaggaccagctatggccagtcacaaggatgacgaagaaaagtttttccccatgcatggaaccctgatatttggtaaacaaggaacaaatgccaacgacgcggatttggaaaatgtcatgattacagatgaagaagaaatcagggccaccaatcccgtggctacggagcagtacgggactgtgtcaaataatttgcaaaactcaaacactggtccaactactggaactgtcaatcaccaaggagcgttacctggtatggtgtggcaggatcgagacgtgtacctgcagggacccatttgggccaagattcctcacaccgatggacactttcatccttctccactgatgggaggttttggactcaaacacccgcctcctcagatcatgatcaaaaacactcccgttccagccaatcctcccacaaacttcagttctgccaagtttgcttctttcatcacacagtattccacgggacaggtcagcgtggagatcgagtgggagctgcagaaggagaacagcaaacgctggaatcccgaaattcagtacacttccaactacaacaagtctgttaatgtggactttactgtggacactaatggtgtgtattcagagcctcgccccattggcaccagatacctgactcgtaatctgtaa

SEQ ID NO: 265 - protein, 735 aa, Artificial Sequence
  source: /note="Description of Artificial Sequence: Synthetic polypeptide"
MAADGYLPDWLEDTLSEGIRQWWKLKPGPPPPKPAERHKDDSRGLVLPGYKYLGPFNGLDKGEPVNEADAAALEHDKAYDRQLDSGDNPYLKYNHADAEFQERLKEDTSFGGNLGRAVFQAKKRVLEPLGLVEEPVKTAPGKKRPVEHSPVEPDSSSGTGKAGQQPARKRLNFGQTGDADSVPDPQPLGQPPAAPSGLGSTTMATGSGAPMADNNEGADGVGNSSGNWHCDSQWLGDRVITTSTRTWALPTYNNHLYKQISSQSGASNDNHYFGYSTPWGYFDFNRFHCHFSPRDWQRLVNNNRGFRPKRLNFKLFNIQVKEVTQNDGTTTIANNLTSTVQVFTDSEYQLPYVLGSAHQGCLPPFPADVFMVPQYGYLTLNNGSQAVGRSSFYCLEYFPSQMLRTGNNFQFSYTFEDVPFHSSYAHSQSLDRLMNPLIDQYLYYLNKTQTNSGTLQQSRLLFSQAGPTNMSLQAKNWLPGPCYRQQRLSKQANDNNNSNFPWTAATKYHLNGRDSLVNPGPAMASHKDDEEKFFPMHGTLIFGKQGTNANDADLENVMITDEEEIRATNPVATEQYGTVSNNLQNSNTGPTTGTVNHQGALPGMVWQDRDVYLQGPIWAKIPHTDGHFHPSPLMGGFGLKHPPPQIMIKNTPVPANPPTNFSSAKFASFITQYSTGQVSVEIEWELQKENSKRWNPEIQYTSNYNKSVNVDFTVDTNGVYSEPRPIGTRYLTRNL

SEQ ID NO: 266 - protein, 738 aa, Artificial Sequence
  source: /note="Description of Artificial Sequence: Synthetic polypeptide"
MAADGYLPDWLEDNLSEGIREWWDLKPGAPKPKANQQKQDDGRGLVLPGYKYLGPFNGLDKGEPVNAADAAALEHDKAYDQQLKAGDNPYLRYNHADAEFQERLQEDTSFGGNLGRAVFQAKKRVLEPLGLVEEAAKTAPGKKRPVEPSPQRSPDSSTGIGKKGQQPAKKRLSFGQTGDSESVPDPQPIGEPPAGPSGLGSGTMAAGGGAPMADNNEGADGVGSSSGNWHCDSTWLGDRVITTSTRTWALPTYNNHLYKQISNGTSGGSTNDNTYFGYSTPWGYFDFNRFHCHFSPRDWQRLINNNWGFRPKRLSFKLFNIQVKEVTQNEGTKTIANNLTSTIQVFTDSEYQLPYVLGSAHQGCLPPFPADVFMIPQYGYLTLNNGSQAVGRSSFYCLEYFPSQMLRTGNNSEFSYTFEDVPFHSSYAHSQSLDRLMNPLIDQYLYYLSRTQSTGGTQGTQQLLFSQAGPANMSAQAKNWLPGPCYRQQRVSTTLSQNNNSNFAWTGATKYHLNGRDSLVNPGVAMATHKDDEERFFPSSGVLMFGKQGAGRDNVDYSSVMLTSEEEIKTTNPVATEQYGVVADNLQQTNTGPIVGNVNSQGALPGMVWQNRDVYLQGPIWAKIPHTDGNFHPSPLMGGFGLKHPPPQILIKNTPVPADPPTTFSQAKLASFITQYSTGQVSVEIEWELQKENSKRWNPEIQYTSNYYKSTNVDFAVNTEGTYSEPRPIGTRYLTRNL

SEQ ID NO: 267 - DNA, 2217 bp, Artificial Sequence
  source: /note="Description of Artificial Sequence: Synthetic polynucleotide"
atggctgctgacggttatcttccagattggctcgaggacaacctctctgagggcattcgcgagtggtgggacctgaaacctggagcccccaagcccaaggccaaccagcagaagcaggacgacggccggggtctggtgcttcctggctacaagtacctcggacccttcaacggactcgacaagggggagcccgtcaacgcggcggacgcagcggccctcgagcacgacaaggcctacgaccagcagctcaaagcgggtgacaatccgtacctgcggtataaccacgccgacgccgagtttcaggagcgtctgcaagaagatacgtcttttgggggcaacctcgggcgagcagtcttccaggccaagaagcgggttctcgaacctctcggtctggttgaggaagctgctaagacggctcctggaaagaagagaccggtagaaccgtcacctcagcgttcccccgactcctccacgggcatcggcaagaaaggccagcagcccgctaaaaagagactgagctttggtcagactggcgactcagagtcagtccccgaccctcaaccaatcggagaaccaccagcaggcccctctggtctgggatctggtacaatggctgcaggcggtggcgctccaatggcagacaataacgaaggcgccgacggagtgggtagttcctcaggaaattggcattgcgattccacatggctgggcgacagagtcatcaccaccagcacccgaacctgggccctgcccacctacaacaaccacctctacaagcaaatatccaatgggacatcgggaggaagcaccaacgacaacacctacttcggctacagcaccccctgggggtattttgacttcaacagattccactgccacttctcaccacgtgactggcagcgactcatcaacaacaactggggattccggccaaaaagactcagcttcaagctcttcaacatccaggtcaaggaggtcacgcagaatgaaggcaccaagaccatcgccaataaccttaccagcacgattcaggtatttacggactcggaataccagctgccgtacgtcctcggctccgcgcaccagggctgcctgcctccgttcccggcggacgtcttcatgattccccagtacggctaccttacactgaacaatggaagtcaagccgtaggccgttcctccttctactgcctggaatattttccatctcaaatgctgcgaactggaaacaattctgaattcagctacaccttcgaggacgtgcctttccacagcagctacgcacacagccagagcttggaccgactgatgaatcctctcatcgaccagtacctgtactacttatccagaactcagtccacaggaggaactcaaggtacccagcaattgttattttctcaagctgggcctgcaaacatgtcggctcaggctaagaactggctacctggaccttgctaccggcagcagcgagtctctacgacactgtcgcaaaacaacaacagcaactttgcttggactggtgccaccaaatatcacctgaacggaagagactctttggtaaatcccggtgtcgccatggcaacccacaaggacgacgaggaacgcttcttcccgtcgagtggagtcctgatgtttggaaaacagggtgctggaagagacaatgtggactacagcagcgttatgctaaccagcgaagaagaaattaaaaccactaaccctgtagccacagaacaatacggtgtggtggctgacaacttgcagcaaaccaatacagggcctattgtgggaaatgtcaacagccaaggagccttacctggcatggtctggcagaaccgagacgtgtacctgcagggtcccatctgggccaagattcctcacacggacggcaacttccacccttcaccgctaatgggaggatttggactgaagcacccacctcctcagatcctgatcaagaacacgccggtacctgcggatcctccaacaacgttcagccaggcgaaattggcttccttcattacgcagtacagcaccggacaggtcagcgtggaaatcgagtgggagctgcagaaggagaacagcaaacgctggaacccagagattcagtacacttcaaactactacaaatctacaaatgtggactttgctgtcaatacagagggaacttattctgagcctcgccccattggtactcgttacctcacccgtaatctgtaa

SEQ ID NO: 268 - protein, 738 aa, Artificial Sequence
  source: /note="Description of Artificial Sequence: Synthetic polypeptide"
MAADGYLPDWLEDNLSEGIREWWDLKPGAPKPKANQQKQDDGRGLVLPGYKYLGPFNGLDKGEPVNAADAAALEHDKAYDQQLKAGDNPYLRYNHADAEFQERLQEDTSFGGNLGRAVFQAKKRVLEPLGPVEEAAKTAPGKKRPVEPPPQRSPDSSTGIGKKGQQPAKKRLNFGQTGDSESVPDPQPIGEPPAGPSGLGSGTMAAGGGAPMADNNEGADGVGSSSGNWHCDSTWLGDRVITTSTRTWALPTYNNHLYKQISNGTSGGSTNDNTYFGYSTPWGYFDFNRFHCHFSPRDWQRLINNNWGFRPKRLSFKLFNIQVKEVTQNEGTKTVANNLTSTIQVFTDSEYQLPYVLGSAHQGCLPPFPADVFMIPQYGYLTLNNGSQAVGRSSFYCLEYFPSQMLRTGNNFEFSYTFEDVPFHSSYAHSQSLDRLMNPLIDQYLYYLSRTQSTGGTQGTQQLLFSQAGPANMSAQAKNWLPGPCYRQQRVSTTLSQNNNSNFAWTGATKYHLNGRDSLVNPGVAMATHKDDEERFFPSSGVLMFGKQGAGRDNVDYSSVMLTSEEEIKTTNPVATEQYGVVADNLQQTNTGPIVGNVNSQGALPGMVWQNRDVYLQGPIWAKIPHTDGNFHPSPLMGGFGLKHPPPQILIKNTPVPADPPTTFSQAKLASFITQYSTGQVSVEIEWELQKENSKRWNPEIQYTSNYYKSTNVDFAVNTEGTYSEPRPIGTRYLTRNL

SEQ ID NO: 269 - DNA, 2217 bp, Artificial Sequence
  source: /note="Description of Artificial Sequence: Synthetic polynucleotide"
atggctgctgacggttatcttccagattggctcgaggacaacctctctgagggcattcgcgagtggtgggacctgaaacctggagcccccaagcccaaggccaaccagcagaagcaggacgacggccggggtctggtgcttcctggctacaagtacctcggacccttcaacggactcgacaagggggagcccgtcaacgcggcggacgcagcggccctcgagcacgacaaggcctacgaccagcagctcaaagcgggtgacaatccgtacctgcggtataaccacgccgacgccgagtttcaggagcgtctacaagaagatacgtcttttgggggcaacctcgggcgagcagtcttccaggccaagaagcgggttctcgaacctctcggtccggttgaggaagctgctaagacggctcctggaaagaagagaccggtagaaccgccacctcagcgttcccccgactcctccacgggcatcggcaagaaaggccagcagcccgctaaaaagagactgaactttggtcagactggcgactcagagtcagtccccgaccctcaaccaatcggagaaccaccagcaggcccctctggtctgggatctggtacaatggctgcaggcggtggcgctccaatggcagacaataacgaaggcgccgacggagtgggtagttcctcaggaaattggcattgcgattccacatggctgggcgacagagtcatcaccaccagcacccgaacctgggccctgcccacctacaacaaccacctctacaagcaaatatccaatgggacatcgggaggaagcaccaacgacaacacctacttcggctacagcaccccctgggggtattttgacttcaacagattccactgccacttctcaccacgtgactggcagcgactcatcaacaacaactggggattccggccaaaaagactcagcttcaagctcttcaacatccaggtcaaggaggtcacgcagaatgaaggcaccaagaccgtcgccaataaccttaccagcacgattcaggtatttacggactcggaataccagctgccgtacgtcctcggctccgcgcaccagggctgcctgcctccgttcccggcggacgtcttcatgattccccagtacggctaccttacactgaacaatggaagtcaagccgtaggccgttcctccttctactgcctggaatattttccatctcaaatgctgcgaactggaaacaattttgaattcagctacaccttcgaggacgtgcctttccacagcagctacgcacacagccagagcttggaccgactgatgaatcctctcatcgaccagtacctgtactacttatccagaactcagtccacaggaggaactcaaggtacccagcaattgttattttctcaagctgggcctgcaaacatgtcggctcaggctaagaactggctacctggaccttgctaccggcagcagcgagtctctacgacactgtcgcaaaacaacaacagcaactttgcttggactggtgccaccaaatatcacctgaacggaagagactctttggtaaatcccggtgtcgccatggcaacccacaaggacgacgaggaacgcttcttcccgtcgagtggagtcctgatgtttggaaaacagggtgctggaagagacaatgtggactacagcagcgttatgctaaccagcgaagaagaaattaaaaccactaaccctgtagccacagaacaatacggtgtggtggctgacaacttgcagcaaaccaatacagggcctattgtgggaaatgtcaacagccaaggagccttacctggcatggtctggcagaaccgagacgtgtacctgcagggtcccatctgggccaagattcctcacacggacggcaacttccacccttcaccgctaatgggaggatttggactgaagcacccacctcctcagatcctgatcaagaacacgccggtacctgcggatcctccaacaacgttcagccaggcgaaattggcttccttcattacgcagtacagcaccggacaggtcagcgtggaaatcgagtgggagctgcagaaggagaacagcaaacgttggaacccagagattcagtacacttcaaactactacaaatctacaaatgtggactttgctgtcaatacagagggaacttattctgagcctcgccccattggtactcgttacctcacccgtaatctgtaa

SEQ ID NO: 270 - protein, 738 aa, Artificial Sequence
  source: /note="Description of Artificial Sequence: Synthetic polypeptide"
MAADGYLPDWLEDNLSEGIREWWDLKPGAPKPKANQQKQDDGRGLVLPGYKYLGPFNGLDKGEPVNAADAAALEHDKAYDQQLKAGDNPYLRYNHADAEFQERLQEDTSFGGNLGRAVFQAKKRVLEPLGLVEEAAKTAPGKKRPVEPSPQRSPDSSTGIGKKGQQPAKKRLNFGQTGDSESVPDPQPIGEPPAGPSGLGSGTMAAGGGAPMADNNEGADGVGSSSGNWHCDSTWLGDRVITTSTRTWALPTYNNHLYKQISNGTSGGSTNDNTYFGYSTPWGYFDFNRFHCHFSPRDWQRLINNNWGFRPKRLSFKLFNIQVKEVTQNEGTKTIANNLTSTIQVFTDSEYQLPYVLGSAHQGCLPPFPADVFMIPQYGYLTLNNGSQAVGRSSFYCLEYFPSQMLRTGNNFEFSYTFEDVPFHSSYAHSQSLDRLMNPLIDQYLYYLSRTQSTGGTQGTQQLLFSQAGPANMSAQAKNWLPGPCYRQQRVSTTLSQSNNSNFAWTGATKYHLNGRDSLVNPGVAMATHKDDEERFFPSSGVLMFGKQGAGRDNVDYSSVMLTSEEEIKTTNPVATEQYGVVADNLQQTNTGPIVGNVNSQGALPGMVWQNRDVYLQGPIWAKIPHTDGNFHPSPLMGGLGLKHPPPQILIKNTPVPADPPTTFSQAKLASFITQYSTGQVSVEIEWELQKENSKRWNPEIQYTSNYYKSTNVDFAVNTEGTYSEPRPIGTRYLTRNL

SEQ ID NO: 271 - DNA, 2217 bp, Artificial Sequence
  source: /note="Description of Artificial Sequence: Synthetic polynucleotide"
atggctgctgacggttatcttccagattggctcgaggacaacctctctgagggcattcgcgagtggtgggacctgaaacctggagcccccaagcccaaggccaaccagcagaagcaggacgacggccggggtctggtgcttcctggctacaagtacctcggacccttcaacggactcgacaagggggagcccgtcaacgcggcggacgcagcggccctcgagcacgacaaggcctacgaccagcagctcaaagcgggtgacaatccgtacctgcggtataaccacgccgacgccgagtttcaggagcgtctgcaagaagatacgtcttttgggggcaacctcgggcgagcagtcttccaggccaagaagcgggttctcgaacctctcggtctggttgaggaagcggctaagacggctcctggaaagaagagaccggtagaaccgtcacctcagcgttcccccgactcctccacgggcatcggcaagaaaggccagcagcccgctaaaaagagactgaactttggtcagactggcgactcagagtcagtccccgaccctcaaccaatcggagaaccaccagcaggcccctctggtctgggatctggtacaatggctgcaggcggtggcgctccaatggcagacaataacgaaggcgccgacggagtgggtagttcctcaggaaattggcattgcgattccacatggctgggcgacagagtcatcaccaccagcacccgaacctgggccctgcccacctacaacaaccacctctacaagcaaatatccaatgggacatcgggaggaagcaccaacgacaacacctacttcggctacagcaccccctgggggtattttgacttcaacagattccactgccacttctcaccacgtgactggcagcgactcatcaacaacaactggggattccggccaaaaagactcagcttcaagctcttcaacatccaggtcaaggaggtcacgcagaatgaaggcaccaagaccatcgccaataaccttaccagcacgattcaggtatttacggactcggaataccagctgccgtacgtcctcggctccgcgcaccagggctgcctgcctccgttcccggcggacgtcttcatgattccccagtacggctaccttacactgaacaatggaagtcaagccgtaggccgttcctccttctactgcctggaatattttccatctcaaatgctgcgaactggaaacaattttgaattcagctacaccttcgaggacgtgcctttccacagcagctacgcacacagccagagcttggaccgactgatgaatcctctcatcgaccagtacctgtactacttatccagaactcagtccacaggaggaactcaaggtacccagcaattgttattttctcaagctgggcctgcaaacatgtcggctcaggctaagaactggctacctggaccttgctaccggcagcagcgagtctctacgacactgtcgcaaagcaacaacagcaactttgcttggactggtgccaccaaatatcacctgaacggaagagactctttggtaaatcccggtgtcgccatggcaacccacaaggacgacgaggaacgcttcttcccgtcgagtggagtcctgatgtttggaaaacagggtgctggaagagacaatgtggactacagcagcgttatgctaaccagcgaagaagaaattaaaaccactaaccctgtagccacagaacaatacggtgtggtggctgacaacttgcagcaaaccaatacagggcctattgtgggaaatgtcaacagccaaggagccttacctggcatggtctggcagaaccgagacgtgtacctgcagggtcccatctgggccaagattcctcacacggacggcaacttccacccttcaccgctaatgggaggacttggactgaagcacccacctcctcagatcctgatcaagaacacgccggtacctgcggatcctccaacaacgttcagccaggcgaaattggcttccttcattacgcagtacagcaccggacaggtcagcgtggaaatcgagtgggagctgcagaaggagaacagcaaacgctggaacccagagattcagtacacttcaaactactacaaatctacaaatgtggactttgctgtcaatacagagggaacttattctgagcctcgccccattggtactcgttacctcacccgtaatctgtaa

SEQ ID NO: 272 - protein, 737 aa, Artificial Sequence
  source: /note="Description of Artificial Sequence: Synthetic polypeptide"
MAADGYLPDWLEDNLSEGIREWWDLKPGAPKPKANQQKQDDGRGLVLPGYKYLGPFNGLDKGEPVNAADAAALEHDKAYDQQLKAGDNPYPRYNHADAEFQERLQEDTPFGGNLGRAVFQAKKRVLEPLGLVEEAAKTAPGKKRPVEPSPQRSPDSSTGIGKKGQQPAKKRLNFGQTGDSESVPDPQPIGEPPAGPSGLGSGTMAAGGGAPMADNNEGADGVGNASGNWHCDSTWLGDRVITTSTRTWALPTYNNHLYKQISSASTGASNDNHYFGYSTPWGYFDFNRFHCHFSPRDWQRLINNNWGFRPKRLNFKLFNIQVKEVTTNDGVTTIANNLTSTVQVFSDSEYQLPYVLGSAHQGCLPPFPADVFMIPQYGYLTLNNGSQAVGRSSFYCLEYFPSQMLRTGNNFTFSYTFEEVPLHSSYAHSQSLDRLMNPLIVQYLYYLNRTQNQSGSAQNKDLLFSRGSPAGMSVQPKNWLPGPCYRQQRVSKTKTDNNNSNFTWTGASKYNLNGRESIINPGTAMASHKDDEDKFFPMSGVMIFGKESAGASNTALDNVMITDEEEIKATNPVATERFGTVAVNFQSSSTDPATGDVHAMGALPGMVWQDRDVYLQGPIWAKIPHTDGHFHPSPLMGGFGLKNPPPQILIKNTPVPANPPAEFSATKFASFITQYSTGQVSVEIEWELQKENSKRWNPEVQYTSNYAKSASVDFTVDNNGLYTEPRPIGTRYLTRPL

SEQ ID NO: 273 - protein, 737 aa, Artificial Sequence
  source: /note="Description of Artificial Sequence: Synthetic polypeptide"
MAADGYLPDWLEDNLSEGIREWWDLKPGAPKPKANQQKQDDGRGLVLPGYKYLGPFNGLDKGEPVNAADAAALEHDKAYDQQLKAGDNPYPRYNHADAEFQERLQEDTSFGGNLGRAVFQAKKRVLEPLGLVEEAAKTAPGKKRPVEPSPQRSPDSSTGIGKKGQQPAKKRLNFGQTGDSESVPDPQPIGEPPAGPSGLGSGTMAAGGGAPMADNNEGADGVGNASGNWHCDSTWLGDRVITTSTRTWALPTYNNHLYKQISSASTGASNDNHYFGYSTPWGYFDFNRFHCHFSPRDWQRLINNNWGFRPKRLNFKLFNIQVKEVTTNDGVTTIANNLTSTVQVFSDSEYQLPYVLGSAHQGCLPPFPADVFMIPQYGYLTLNNGSQAVGRSSFYCLEYFPSQMLRTGNNFTFSYTFEEVPLHSSYAHSQSLDRLMNPLIDQYLYYLNRTQNQSGSAQNKDLLFSRGSPAGMSVQPKNWLPGPCYRQQRVSKTKTDNNNSNFTWTGASKYNLNGRESIINPGTAMASHKDDEDKFFPMSGVMIFGKESAGASNTALDNVMITDEEEIKATNPVATERFGTVAVNFQSSSTDPATGDVHAMGALPGMVWQDRDVYLQGPIWAKIPHTDGHFHPSPLMGGFGLKNPPPQILIKNTPVPANPPAEFSATKFASFITQYSTGQVSVEIEWELQKENSKRWNPEVQYTSNYAKSASVDFTVDNNGLYTEPRPIGTRYLTRPL

SEQ ID NO: 274 - DNA, 2214 bp, Artificial Sequence
  source: /note="Description of Artificial Sequence: Synthetic polynucleotide"
atggctgctgacggttatcttccagattggctcgaggacaacctctctgagggcattcgcgagtggtgggacctgaaacctggagcccccaagcccaaggccaaccagcagaagcaggacgacggccggggtctggtgcttcctggctacaagtacctcggacccttcaacggactcgacaagggggagcccgtcaacgcggcggacgcagcggccctcgagcacgacaaggcctacgaccagcagctcaaagcgggtgacaatccgtacccgcggtataaccacgccgacgccgagtttcaggagcgtctgcaagaagatacgccttttgggggcaacctcgggcgagcagtcttccaggccaagaagcgggttctcgaacctctcggtctggttgaggaagctgctaagacggctcctggaaagaagagaccggtagaaccgtcacctcagcgttcccccgactcctccacgggcatcggcaagaaaggccagcagcccgctaaaaagagactgaactttggtcagactggcgactcagagtcagtccccgaccctcaaccaatcggagaaccaccagcaggcccctctggtctgggatctggtacaatggctgcaggcggtggcgctccaatggcagacaataacgaaggcgccgacggagtgggtaatgcctcaggaaattggcattgcgattccacatggctgggcgacagagtcatcaccaccagcacccgcacctgggccttgcccacctacaataaccacctctacaagcaaatctccagtgcttcaacgggggccagcaacgacaaccactacttcggctacagcaccccctgggggtattttgatttcaacagattccactgccacttttcaccacgtgactggcagcgactcatcaacaacaattggggattccggcccaagagactcaacttcaaactcttcaacatccaagtcaaggaggtcacgacgaatgatggcgtcacaaccatcgctaataaccttaccagcacggttcaagtcttctcggactcggagtaccagcttccgtacgtcctcggctctgcgcaccagggctgcctccctccgttcccggcggacgtgttcatgattccgcaatacggctacctgacgctcaacaatggcagccaagccgtgggacgttcatccttttactgcctggaatatttcccttctcagatgctgagaacgggcaacaactttaccttcagctacacctttgaggaagtgcctctccacagcagctacgcgcacagccagagcctggaccggctgatgaatcctctcatcgtccaatacctgtattacctgaacagaactcaaaatcagtccggaagtgcccaaaacaaggacttgctgttcagccgtgggtctccagctggcatgtctgttcagcccaaaaactggctacctggaccctgttatcggcagcagcgcgtttctaaaacaaaaacagacaacaacaacagcaattttacctggactggtgcttcaaaatataacctcaatgggcgtgaatccatcatcaaccctggcactgctatggcctcacacaaagacgacgaagacaagttctttcccatgagcggtgtcatgatttttggaaaagagagcgccggagcttcaaacactgcattggacaatgtcatgattacagacgaagaggaaattaaagccactaaccctgtggccaccgaaagatttgggaccgtggcagtcaatttccagagcagcagcacagaccctgcgaccggagatgtgcatgctatgggagcattacctggcatggtgtggcaagatagagacgtgtacctgcagggtcccatttgggccaaaattcctcacacagatggacactttcacccgtctcctcttatgggcggctttggactcaagaacccgcctcctcagatcctcatcaaaaacacgcctgttcctgcgaatcctccggcggagttttcagctacaaagtttgcttcattcatcacccaatactccacaggacaagtgagtgtggaaattgaatgggagctgcagaaagaaaacagcaagcgctggaatcccgaagtgcagtacacatccaattatgcaaaatctgccagcgttgattttactgtggacaacaatggactttatactgagcctcgccccattggcacccgttaccttacccgtcccctgtaa

SEQ ID NO: 275 - protein, 736 aa, Artificial Sequence
  source: /note="Description of Artificial Sequence: Synthetic polypeptide"
MAADGYLPDWLEDTLSEGIRQWWKLRPGPPPPKPAERHKDDSRGLVLPGYKYLGPFNGLDKGEPVNEADAAALEHDKAYDRQLDSGDNPYLKYNHADAEFQERLKEDTSFGGNLGRAVFQAKKRVLEPLGLVEEGAETAPGKKRPVEQSPQGPDSSSGIGKTGQQPAKKRLNFGQTGDSESVPDPQPLGEPPATPAAVGPTTMASGGGAPMADNNEGADGVGNASGNWHCDSTWLGDRVITTSTRTWALPTYNNHLYKQISSASTGASNDNHYFGYSTPWGYFDFNRFHCHFSPRDWQRLINNNWGFRPKRLNFKLFNIQVKEVTTNDGVTTIANNLTSTVQVFSDSEYQLPYVLGSAHQGCLPPFPADVFMIPQYGYLTLNNGSQAVGRSSFYCLEYFPSQMLRTGNNFTFSYTFEEVPFHSSYAHSQSLDRLMNPLIDQYLYYPNRTQNQSGSAQNKDLLFSRGSPAGMSVQPKNWLPGPCYRQQRVSKTKTDNNNSNFTWTGASKYNLNGRESIINPGTAMASHKDDEDKFFPMSGVMIFGKESAGASNTALDNVMITDEEEIKATNPVATERFGTVAVNFQSSSTDPATGDVHAMGALPGMVWQGRDVYLQGPIWAKIPHTDGHFHPSPLMGGFGLKNPPPQILIKNTPVPANPPAEFSATKFASFITQYSTGQVSVEIEWELQKENSKRWNPEVQYTSNYAKSANVDFTVDNNGLYTEPRPIGTRYLTRPL

SEQ ID NO: 276 - DNA, 2211 bp, Artificial Sequence
  source: /note="Description of Artificial Sequence: Synthetic polynucleotide"
atggctgccgatggttatcttccagattggctcgaggacactctctctgaaggaataagacagtggtggaagctcagacctggcccaccaccaccaaagcccgcagagcggcataaggacgacagcaggggtcttgtgcttcctgggtacaagtacctcggacccttcaacggactcgacaagggagagccggtcaacgaggcagacgccgcggccctcgagcacgacaaagcctacgaccggcagctcgacagcggagacaacccgtacctcaagtacaaccacgccgacgcggagtttcaggagcgccttaaagaagatacgtcttttgggggcaacctcgggcgagcagtcttccaggccaagaagcgggttctcgaacctctcggtctggttgaggaaggcgctgagacggctcctggaaagaaacgtccggtagagcagtcgccacaagggccagactcctcctcgggcatcggcaagacaggccagcagcccgctaaaaagagactcaattttggtcagactggcgactcagagtcagtccccgatccacaacctctcggagaacctccagcaacccccgctgctgtgggacctactacaatggcttcaggcggtggcgcaccaatggcagacaataacgaaggcgccgacggagtgggtaatgcctcaggaaattggcattgcgattccacatggctgggcgacagagtcatcaccaccagcacccgcacctgggccttgcccacctacaataaccacctctacaagcaaatctccagtgcttcaacgggggccagcaacgacaaccactacttcggctacagcaccccctgggggtattttgatttcaacagattccactgccacttttcaccacgtgactggcagcgactcatcaacaacaattggggattccggcccaagagactcaacttcaaactcttcaacatccaagtcaaggaggtcacgacgaatgatggcgtcacaaccatcgctaataaccttaccagcacggttcaagtcttctcggactcggagtaccagcttccgtacgtcctcggctctgcgcaccagggctgcctccctccgttcccggcggacgtgttcatgattccgcaatacggctacctgacgctcaacaatggcagccaagccgtgggacgttcatccttttactgcctggaatatttcccttctcagatgctgagaacgggcaacaactttaccttcagctacacctttgaggaagtgcctttccacagcagctacgcgcacagccagagcctggaccggctgatgaatcctctcatcgaccaatacctgtattacccgaacagaactcaaaatcagtccggaagtgcccaaaacaaggacttgctgtttagccgtgggtctccagctggcatgtctgttcagcccaaaaactggctacctggaccctgttatcggcagcagcgcgtttctaaaacaaaaacagacaacaacaacagcaattttacctggactggtgcttcaaaatataacctcaatgggcgtgaatccatcatcaaccctggcactgctatggcctcacacaaagacgacgaagacaagttctttcccatgagcggtgtcatgatttttggaaaagagagcgccggagcttcaaacactgcattggacaatgtcatgattacagacgaagaggaaattaaagccactaaccctgtggccaccgaaagatttgggaccgtggcagtcaatttccagagcagcagcacagaccctgcgaccggagatgtgcatgctatgggagcattacctggcatggtgtggcaaggtagagacgtgtacctgcagggtcccatttgggccaaaattcctcacacagatggacactttcacccgtctcctcttatgggcggctttggactcaagaacccgcctcctcagatcctcatcaaaaacacgcctgttcctgcgaatcctccggcggagttttcagctacaaagtttgcttcattcatcacccaatactccacaggacaagtgagtgtggaaattgaatgggagctgcagaaagaaaacagcaagcgctggaatcccgaagtgcagtacacatccaattatgcaaaatctgccaacgttgattttactgtggacaacaatggactttatactgagcctcgccccattggcacccgttaccttacccgtcccctgtaa

SEQ ID NO: 277 - protein, 736 aa, Artificial Sequence
  source: /note="Description of Artificial Sequence: Synthetic polypeptide"
MAADGYLPDWLEDTLSEGIRQWWKLRPGPPPPKPAERHKDDSRGLVLPGYKYLGPFNGLDKGEPVNEADAAALEHDKAYDRQLDSGDNPYLKYNHADAEFQERLKEDTSFGGNLGRAVFQAKKRVLEPLGLVEEGAKTAPGKKRPVEQSPQGPDSSSGIGKTGQQPAKKRLNFGQTGDSESVPDPQPLGEPPATPAAVGPTTMASGGGAPMADNNEGADGVGNASGNWHCDSTWLGDRVITTSTRTWALPTYNNHLYKQISSASTGASNDNHYFGYSTPWGYFDFNRFHCHFSPRDWQRLINNNWGFRPKRLNFKLFNIQVKEVTTNDGVTTIANNLTSTVQVFSDSEYQLPYVLGSAHQGCLPPFPADVFMIPQYGYLTLNNGSQAVGRSSFYCLEYFPSQMLRTGNNFTFSYTFEEVPFHSSYAHSQSLDRLMNPLIDQYLYYPNRTQNQSGSAQNKDLLFSRGSPAGMSVQPKNWLPGPCYRQQRVSKTKTDNNNSNFTWTGASKYNLNGRESIINPGTAMASHKDDEDKFFPMSGVMIFGKESAGASNTALDNVMITDEEEIKATNPVATERFGTVAVNFQSSSTDPATGDVHAMGALPGMVWQGRDVYLQGPIWAKIPHTDGHFHPSPLMGGFGLKNPPPQILIKNTPVPANPPAEFSATKFASFITQYSTGQVSVEIEWELQKENSKRWNPEVQYTSNYAKSANVDFTVDNNGLYTEPRPIGTRYLTRPL

SEQ ID NO: 278 - protein, 736 aa, Artificial Sequence
  source: /note="Description of Artificial Sequence: Synthetic polypeptide"
MAADGYLPDWLEDTLSEGIRQWWKLRPGPPPPKPAERHKDDSRGLVLPGYKYLGPFNGLDKGEPVNEADAAALEHDKAYDRQLDSGDNPYLKYNHADAEFQERLKEDTSFGGNLGRAVFQAKKRVLEPLGLVEEGAKTAPGKKRPVEQSPQGPDSSSGIGKTGQQPAKKRLNFGQTGDSESVPDPQPLGEPPATPAAVGPTTMASGGGAPMADNNEGADGVGNASGNWHCDSTWLGDRVITTSTRTWALPTYNNHLYKQISSASTGASNDNHYFGYSTPWGYFDFNRFHCHFSPRDWQRLINNNWGFRPKRLNFKLFNIQVKEVTTNDGVTTIANNLTSTVQVFSDSEYQLPYVLGSAHQGCLPPFPADVFMIPQYGYLTLNNGSQAVGRSSFYCLEYFPSQMLRTGNNFTFSYTFEEVPFHSSYAHSQSLDRLMNPLIDQYLYYLNRTQNQSGSAQNKDLLFSRGSPAGMSVQPKNWLPGPCYRQQRVSKTKTDNNNSNFTWTGASKYNLNGRESIINPGTAMASHKDDEDKFFPMSGVMIFGKESAGASNTALDNVMITDEEEIKATNPVATERFGTVAVNFQSSSTDPATGDVHAMGALPGMVWQGRDVYLQGPIWAKIPHTDGHFHPSPLMGGFGLKNPPPQILIKNTPVPANPPAEFSATKFASFITQYSTGQVSVEIEWELQKENSKRWNPEVQYTSNYAKSANVDFTVDNNGLYTEPRPIGTRYLTRPL

SEQ ID NO: 279 - protein, 736 aa, Artificial Sequence
  source: /note="Description of Artificial Sequence: Synthetic polypeptide"
MAADGYLPDWLEDTLSEGIRQWWKLRPGPPPPKPAERHKDDSRGLVLPGYKYLGPFNGLDKGEPVNEADAAALEHDKAYDRQLDSGDNPYLKYNHADAEFQERLKEDTSFGGNLGRAVFQAKKRVLEPLGLVEEGAKTAPGKKRPVEQSPQGPDSSSGIGKTGQQPAKKRLNFGQTGDSESVPDPQPLGEPPATPAAVGPTTMASGGGAPMADNNEGADGVGNASGNWHCDSTWLGDRVITTSTRTWALPTYNNHLYKQISSASTGASNDNHYFGYSTPWGYFDFNRFHCHFSPRDWQRLINNNWGFRPKRLNFKLFNIQVKEVTTNDGVTTIANNLTSTVQVFSDSEYQLPYVLGSAHQGCLPPFPADVFMIPQYGYLTLNNGSQAVGRSSFYCLEYFPSQMLRTGNNFTFSYTFEEVPFHSSYAHSQSLDRLMNPLIDQYLYYLNRTQNQSGSAQNKDLLFSRGSPAGMSVQPKNWLPGPCYRQQRVSKTKTDNNNSNFTWTGASKYNLNGRESIINPGTAMASHKDDEDKFFPMSGVMIFGKESAGASNTALDNVMITDEEEIKATNPVATERFGTVAVNFQSSSTDPATGDVHAMGALPGMVWQDRDVYLQGPIWAKIPHTDGHFHPSPLMGGFGLKNPPPQILIKNTPVPANPPAEFSATKFASFITQYSTGQVSVEIEWELQKENSKRWNPEVQYTSNYAKSANVDFTVDNNGLYTEPRPIGTRYLTRPL

SEQ ID NO: 280 - DNA, 2208 bp, Artificial Sequence
  source: /note="Description of Artificial Sequence: Synthetic polynucleotide"
atggctgccgatggctatcttccagattggctcgaggacactctctctgaaggaataagacagtggtggaagctcaaacctggcccaccaccaccaaagcccgcagagcggcatagggacgacagcaggggtcttgtgcttcctgggtacaagtacctcggacccttcaacggactcgacaagggagagccggtcaacgaggcagacgccgcggccctcgagcacgacaaagcctacgaccggcagctcgacagcggagacaacccgtacctcaagtacaaccacgccgacgcggagtttcaggagcgccttaaagaagatacgtcttttgggggcaacctcggacgagcagtcttccaggcgaaaaagagggttcttgaacctctgggcctggttgaggaacctgttaagacggctccgggaaaaaagaggccggtagagcactctcctgtggagccagactcctcctcgggaaccggaaaggcgggccagcagcctgcaagaaaaagattgaattttggtcagactggagacgcagactcagtacctgacccccagcctctcggacagccaccagcagccccctctggtctgggaactaatacgatggctacaggcagtggcgcaccaatggcagacaataacgagggcgccgacggagtgggtaattcctcgggaaattggcattgcgattccacatggatgggcgacagagtcatcaccaccagcacccgaacctgggccctgcccacctacaacaaccacctctacaaacaaatttccagccaatcaggagcctcgaacgacaatcactactttggctacagcaccccttgggggtattttgacttcaacagattccactgccacttttcaccacgtgactggcaaagactcatcaacaacaactggggattccgacccaagagactcaacttcaagctctttaacattcaagtcaaagaggtcacgcagaatgacggtacgacgacgattgccaataaccttaccagcacggttcaggtgtttactgactcggggtaccagctcccgtacgtcctcggctcggcgcatcaaggatgcctcccgccgttcccagcagacgtcttcatggtgccacagtatggataccccaccctgaacaacgggagtcaggcagtaggacgctcttcattttactgcctggagtactttccttctcagatgctgcgtaccggaaacaactttaccttcagctacacttttgaggacgttcctttccacagcagctacgctcacagccagagtctggaccgtctcatgaatcctctcatcgaccagtacctgtattacttgagcacaacaaacactccaagtggaaccaccacgcagtcaaggcttcagttttctcaggccggagcgagtgacattcgggaccagtctaggaactggcttcctggaccctgttaccgccagcagcgagtatcaaagacatctgcggataacaacaacagtgaatactcgtggactggagctaccaagtaccacctcaatggcagagactctctggtgaatccgggcccggccgtggcaagccacaaggacgatgaagaaaagttttttcctcagagcggggttctcatctttgggaagcaaggctcagagaaaacaaatgtggacattgaaaaggtcatgattacagacgaagaggaaatcaggacaaccaatcccgtggctacggagcagtatggttctgtatctaccaacctccagagaggcaacagacaagcagctaccgcagatgtcaacacacaaggcgttcttccaggcatggtctggcaggacagagatgtgtaccttcaggggcccatctgggcaaagattccacacacggacggacattttcacccctctcccctcatgggtggattcggacttaaacaccctcctccacagattctcatcaagaacaccccggtacctgcgaatccttcgaccaccttcagtgcggcaaagtttgcttccttcatcacacagtactccacgggacaggtcagcgtggagatcgagtgggagctgcagaaggaaaacagcaaacgctggaatcccgaaattcagtacacttccaactacaacaagtctgttaatgtggactttactgtggacactaatggcgtgtattcagagcctcgccccattggcaccagatacctgactcgtaatctgtaa

SEQ ID NO: 281 - protein, 735 aa, Artificial Sequence
  source: /note="Description of Artificial Sequence: Synthetic polypeptide"
MAADGYLPDWLEDTLSEGIRQWWKLKPGPPPPKPAERHRDDSRGLVLPGYKYLGPFNGLDKGEPVNEADAAALEHDKAYDRQLDSGDNPYLKYNHADAEFQERLKEDTSFGGNLGRAVFQAKKRVLEPLGLVEEPVKTAPGKKRPVEHSPVEPDSSSGTGKAGQQPARKRLNFGQTGDADSVPDPQPLGQPPAAPSGLGTNTMATGSGAPMADNNEGADGVGNSSGNWHCDSTWMGDRVITTSTRTWALPTYNNHLYKQISSQSGASNDNHYFGYSTPWGYFDFNRFHCHFSPRDWQRLINNNWGFRPKRLNFKLFNIQVKEVTQNDGTTTIANNLTSTVQVFTDSGYQLPYVLGSAHQGCLPPFPADVFMVPQYGYPTLNNGSQAVGRSSFYCLEYFPSQMLRTGNNFTFSYTFEDVPFHSSYAHSQSLDRLMNPLIDQYLYYLSTTNTPSGTTTQSRLQFSQAGASDIRDQSRNWLPGPCYRQQRVSKTSADNNNSEYSWTGATKYHLNGRDSLVNPGPAVASHKDDEEKFFPQSGVLIFGKQGSEKTNVDIEKVMITDEEEIRTTNPVATEQYGSVSTNLQRGNRQAATADVNTQGVLPGMVWQDRDVYLQGPIWAKIPHTDGHFHPSPLMGGFGLKHPPPQILIKNTPVPANPSTTFSAAKFASFITQYSTGQVSVEIEWELQKENSKRWNPEIQYTSNYNKSVNVDFTVDTNGVYSEPRPIGTRYLTRNL

SEQ ID NO: 282 - DNA, 2211 bp, Artificial Sequence
  source: /note="Description of Artificial Sequence: Synthetic polynucleotide"
atggctgccgacggttatcttccagattggctcgaggacactctctctgaaggaataagacagtggtggaagctcaaacctggcccaccaccaccaaagcccgcagagcggcataaggacgacagcaggggtcttgtgcttcctgggtacaagtacctcggacccttcaacggactcgacaagggagagccggtcaacgaggcagacgccgcggccctcgagcacgacaaagcctacgaccggcagctcgacagcggagacaacccgtacctcaagtacaaccacgccgacgcggagtttcaggagcgccttaaagaagatacgtcttttgggggcaacctcgggcgggcagtcttccaggccaagaagcgggttctcgaacctctcggtctggttgaggaaggcgctaagacggctcctggaaagaaacgtccggtagagcagtcgccacaagagccagactccccctcgggcatcggcaagacaggccagcagcccgctaaaaagagactcaattttggtcagactggcgactcagagtcagtccccgatccacaacctctcggagaacctccagcaacccccgctgctgtgggacctactacaatggcttcaggcggtggcgcaccaatggcagacaataacgaaggcgccgacggagtgggtaatgcctcaggaaattggcactgcgattccacatggctgggcgacagagtcatcaccaccagcacccgcacctgggccttgcccacctacaataaccacctctacaagcaaatctccagtgcttcaacgggggccagcaacgacaaccactacttcggctacagcaccccctgggggtattttgatttcaacagattccactgccacttttcaccacgtgactggcagcgactcatcaacaacaattggggattccggcccaagagactcaacttcaaactcttcaacatccaagtcaaggaggtcacgacgaatgatggcgtcacaaccatcgctaataaccttaccagcacggttcaagtcttctcggactcggagtaccagcttccgtacgtcctcggctctgcgcaccagggccgcctccctccgttcccggcggacgtgttcatgattccgcaatacggctacctgacgctcaacaatggcagccaagccgtgggacgttcatcctcttactgcctggaatatttcccttctcagatgctgagaacgggcaacaactttaccttcagctacacctttgaggaagtgcctctccacagcagctgcgcgcacagccagagcctggaccggctgatgaatcctctcatcgaccaatacctgtattacctgaacagaactcaaaatcagtccggaagtgcccaaaacagggacttgctgttcagccgtgggtctccagctggcatgtctgttcagcccaaaaactggctacctggaccctgttatcggcagcagcgcgtttctaaaacaaaaacagacaacaacaacagcaattttacctggactggtgcttcaaaatataacctcaatgggcgtgaatccatcatcaaccctggcactgctatggcctcacacaaagacgacgaagacaagttctttcccatgagcggtgtcatgatttttggaaaagagagcgccggagcttcaaacactgcattggacaatgtcatgattacagacgaagaggaaattaaagccactaaccctgtggccaccgaaagatttgggaccgtggcagtcaatttccagagcagcagcacagaccctgcgaccggagatgtgcatgctatgggagcattacctggcatggtgtggcaagatagagacgtgtacctgcagggtcccatttgggccaaaattcctcacacagatggacactttcacccgtctcctcttatgggcggctttggactcaagaacccgcctcctcagatcctcatcaaaaacacgcctgttcctgcgaatcctccggcggagttttcagctacaaagtttgcttcattcatcacccaatactccgcaggacaagtgagtgtggaaattgaatgggagctgcagaaagaaaacagcaagcgctggaatcccgaagtgcagtacacatccaattatgcaaaatctgccaacgttgattttactgtggacaacaatggactttatactgagcctcgccccattggcacccgttaccttacccgtcccctgtaa

SEQ ID NO: 283 - protein, 736 aa, Artificial Sequence
  source: /note="Description of Artificial Sequence: Synthetic polypeptide"
MAADGYLPDWLEDTLSEGIRQWWKLKPGPPPPKPAERHKDDSRGLVLPGYKYLGPFNGLDKGEPVNEADAAALEHDKAYDRQLDSGDNPYLKYNHADAEFQERLKEDTSFGGNLGRAVFQAKKRVLEPLGLVEEGAKTAPGKKRPVEQSPQEPDSPSGIGKTGQQPAKKRLNFGQTGDSESVPDPQPLGEPPATPAAVGPTTMASGGGAPMADNNEGADGVGNASGNWHCDSTWLGDRVITTSTRTWALPTYNNHLYKQISSASTGASNDNHYFGYSTPWGYFDFNRFHCHFSPRDWQRLINNNWGFRPKRLNFKLFNIQVKEVTTNDGVTTIANNLTSTVQVFSDSEYQLPYVLGSAHQGRLPPFPADVFMIPQYGYLTLNNGSQAVGRSSSYCLEYFPSQMLRTGNNFTFSYTFEEVPLHSSCAHSQSLDRLMNPLIDQYLYYLNRTQNQSGSAQNRDLLFSRGSPAGMSVQPKNWLPGPCYRQQRVSKTKTDNNNSNFTWTGASKYNLNGRESIINPGTAMASHKDDEDKFFPMSGVMIFGKESAGASNTALDNVMITDEEEIKATNPVATERFGTVAVNFQSSSTDPATGDVHAMGALPGMVWQDRDVYLQGPIWAKIPHTDGHFHPSPLMGGFGLKNPPPQILIKNTPVPANPPAEFSATKFASFITQYSAGQVSVEIEWELQKENSKRWNPEVQYTSNYAKSANVDFTVDNNGLYTEPRPIGTRYLTRPL

SEQ ID NO: 284 - protein, 736 aa, Artificial Sequence
  source: /note="Description of Artificial Sequence: Synthetic polypeptide"
MAADGYLPDWLEDTLSEGIRQWWKLKPGPPPPKPAERHKDDSRGLVLPGYKYLGPFNGLDKGEPVNEADAAALEHDKAYDRQLDSGDNPYLKYNHADAEFQERLKEDTSFGGNLGRAVFQAKKRVLEPLGLVEEGAKTAPGKKRPVEQSPQEPDSSSGIGKTGQQPAKKRLNFGQTGDSESVPDPQPLGEPPATPAAVGPTTMASGGGAPMADNNEGADGVGNASGNWHCDSTWLGDRVITTSTRTWALPTYNNHLYKQISSASTGASNDNHYFGYSTPWGYFDFNRFHCHFSPRDWQRLINNNWGFRPKRLNFKLFNIQVKEVTTNDGVTTIANNLTSTVQVFSDSEYQLPYVLGSAHQGCLPPFPADVFMIPQYGYLTLNNGSQAVGRSSFYCLEYFPSQMLRTGNNFTFSYTFEEVPLHSSCAHSQSLDRLMNPLIDQYLYYLNRTQNQSGSAQNRDLLFSRGSPAGMSVQPKNWLPGPCYRQQRVSKTKTDNNNSNFTWTGASKYNLNGRESIINPGTAMASHKDDEDKFFPMSGVMIFGKESAGASNTALDNVMITDEEEIKATNPVATERFGTVAVNFQSSSTDPATGDVHAMGALPGMVWQDRDVYLQGPIWAKIPHTDGHFHPSPLMGGFGLKNPPPQILIKNTPVPANPPAEFSATKFASFITQYSTGQVSVEIEWELQKENSKRWNPEVQYTSNYAKSANVDFTVDNNGLYTEPRPIGTRYLTRPL

SEQ ID NO: 285 - DNA, 2208 bp, Artificial Sequence
  source: /note="Description of Artificial Sequence: Synthetic polynucleotide"
atggctgccgatggctatcttccagattggctcgaggacactctctctgaaggaataagacagtggtggaagctcaaacctggcccaccaccaccaaagcccgcagagcggcatagggacgacagcaggggtcttgtgcttcctgggtacaagtacctcggacccttcaacggactcgacaagggagagccggtcaacgaggcagacgccgcggccctcgagcacgacaaagcctacgaccggcagctcgacagcggagacaacccgtacctcaagtacaaccacgccgacgcggagtttcaggagcgccttaaagaagatacgtcttttgggggcaacctcggacgagcagtcttccaggcgaaaaagagggttcttgaacctctgggcctggttggggaacctgttaagacggctccgggaaaaaagaggccggtagagcactctcctgtggagccagactcctcctcgggaaccggaaaggcgggccagcagcctgcaagaaaaagattgaattttggtcagactggagacgcagactcagtacctgacccccagcctctcggacagccaccagcagccccctctggtctgggaactaatacgatggctacaggcagtggcgcaccaatggcagacaataacgagggcgccgacggagtgggtaattcctcgggaaattggcattgcgattccacatggatgggcgacagagtcatcaccaccagcacccgaacctgggccctgcccacctacaacaaccacctctacaaacaaatttccagccaatcaggagcctcgaacgacagtcactactttggctacagcaccccttgggggtattttgacttcaacagattccactgccacttttcaccacgtgactggcaaagactcatcaacaacaactggggattccgacccaagagactcaacttcaagctctttaacattcaagtcaaagaggtcacgcagaatgacggtacgacgacgattgccaataaccttaccagcacggttcaggtgtttactgactcggagtaccagctcccgtacgtcctcggctcggcgcatcaaggatgcctcccgccgttcccagcagacgtcttcatggtgccacagtatggatacctcaccctgaacaacgggagtcaggcagtaggacgctcttcattttactgcctggagtactttccttctcagatgctgcgtaccggaaacaactttaccttcagctacacttttgaggacgttcctttccacagcagctacgctcacagccagagtctggaccgtctcatgaatcctctcatcgaccagtacctgtattacttgagcacaacaaacactccaagtggaaccaccacgcagtcaaggctccagttttctcaggccggagcgagtgacattcgggaccagtctaggaactggcttcctggaccctgttaccgccagcagcgagtatcaaagacatctgcggataacaacaacagtgaatactcgtggactggagctaccaagtaccacctcaatggcagagactctctggtgaatccgggcccggccatggcaagccacaaggacaatgaagaaaagttttttcctcagagcggggttctcatctttgggaagcaaggctcagagaaaacaaatgtggacattgaaaaggtcatgattacagacgaagaggaaatcaggacaaccaatcccgtggctacggagcagtatggttctgtatctaccaacctccagagaggcaacagacaagcagctaccgcagatgtcaacacacaaggcgttcttccaggcatggtctggcaggacagagatgtgtaccttcaggggcccatctgggcaaagattccacacacggacggacattttcacccctctcccctcatgggtggattcggacttaaacaccctcctccacagattctcatcaagaacaccccggtacctgcgaatccttcgaccaccttcagtgcggcaaagtttgcttccttcatcacacagtactccacgggacaggtcagcgtggagatcgagtgggagctgcagaaggaaaacagcaaacgctggaatcccgaaattcagtacacttccaactacaacaagtctgttaatgtggactttactgtggacactaatggcgtgtattcagagcctcgccccattggcaccagatacctgactcgtaatctgtaa

SEQ ID NO: 286 - protein, 735 aa, Artificial Sequence
  source: /note="Description of Artificial Sequence: Synthetic polypeptide"
MAADGYLPDWLEDTLSEGIRQWWKLKPGPPPPKPAERHRDDSRGLVLPGYKYLGPFNGLDKGEPVNEADAAALEHDKAYDRQLDSGDNPYLKYNHADAEFQERLKEDTSFGGNLGRAVFQAKKRVLEPLGLVGEPVKTAPGKKRPVEHSPVEPDSSSGTGKAGQQPARKRLNFGQTGDADSVPDPQPLGQPPAAPSGLGTNTMATGSGAPMADNNEGADGVGNSSGNWHCDSTWMGDRVITTSTRTWALPTYNNHLYKQISSQSGASNDSHYFGYSTPWGYFDFNRFHCHFSPRDWQRLINNNWGFRPKRLNFKLFNIQVKEVTQNDGTTTIANNLTSTVQVFTDSEYQLPYVLGSAHQGCLPPFPADVFMVPQYGYLTLNNGSQAVGRSSFYCLEYFPSQMLRTGNNFTFSYTFEDVPFHSSYAHSQSLDRLMNPLIDQYLYYLSTTNTPSGTTTQSRLQFSQAGASDIRDQSRNWLPGPCYRQQRVSKTSADNNNSEYSWTGATKYHLNGRDSLVNPGPAMASHKDNEEKFFPQSGVLIFGKQGSEKTNVDIEKVMITDEEEIRTTNPVATEQYGSVSTNLQRGNRQAATADVNTQGVLPGMVWQDRDVYLQGPIWAKIPHTDGHFHPSPLMGGFGLKHPPPQILIKNTPVPANPSTTFSAAKFASFITQYSTGQVSVEIEWELQKENSKRWNPEIQYTSNYNKSVNVDFTVDTNGVYSEPRPIGTRYLTRNL

SEQ ID NO: 287 - protein, 737 aa, Artificial Sequence
  source: /note="Description of Artificial Sequence: Synthetic polypeptide"
RMAADGYLPDWLEDNLSEGIREWWDLKPGAPKPKANQQKQDDGRGLVLPGYKYLGPFNGLDKGEPVNAADAAALEHDKAYDQQLKAGDNPYLRYNHADAEFQERLQEDTSFGGNLGRAVFQAKKRVLEPLGLVEEGAKTAPGKKRPVEQSPQEPDSSSGIGKTGQQPAKKRLNFGQTGDSESVPDPQPLGEPPATPAAVGPTTMASGGGAPMADNNEGADGVGNASGNWHCDSTWLGDRVITTSTRTWALPTYNNHLYKQISSTSTGASNDNHYFGYGTPWGYFDFNRFHCHFSPRDWQRLINNNWGFRPKRLNFKLFNIQVEEVTTNDGVTTIANNLTSTVQVFSDSEYQLPYVLGSAHQGCLPPFPADVFMIPQYGYLTLNNGSQAVGRSSFYCLEYFPSQMLRTGNNFTFSYTFEEVPFHSSYAHSQSLDRLMNPLIDQYLYYLNRTQNQSGSAQNKDLLFSRGSPAGMSVQPKNWLPGPCYRQQRVSKTKTDNNNSNFTWTGASKYNLNGRESIINPGTAVASHKDDEDKFFPMSGVMIFGKESAGASSTALDNVMITDEEEIKATNPVATERFGTVAVNFQSSSTDPATGDVHAMGALPGMVWQDRDVYLQGPIWAKIPHTDGHFHPSPLMGGFGLKNPPPQILIKNTPVPANPPAEFSATKFASFITQYSTGQVSVEIEWELQKENSKRWNPEVQYTSNYAKSANVDFTVDNNGLYTEPRPIGTRYLTRPL

SEQ ID NO: 288 - protein, 736 aa, Artificial Sequence
  source: /note="Description of Artificial Sequence: Synthetic polypeptide"
MAADGYLPDWLEDNLSEGIREWWDLKPGAPKPKANQQKQDDGRGLVLPGYKYLGPFNGLDKGEPVNAADAAALEHDKAYDQQLKAGDNPYLRYNHADAEFQERLQEDTSFGGNLGRAVFQAKKRVLEPLGLVEEGAKTAPGKKRPVEQSPQEPDSSSGIGKTGQQPAKKRLNFGQTGDSESVPDPQPLGEPPATPAAVGPTTMASGGGAPMADNNEGADGVGNASGNWHCDSTWLGDRVITTSTRTWALPTYNNHLYKQISSTSTGASNDNHYFGYGTPWGYFDFNRFHCHFSPRDWQRLINNNWGFRPKRLNFKLFNIQVEEVTTNDGVTTIANNLTSTVQVFSDSEYQLPYVLGSAHQGCLPPFPADVFMIPQYGYLTLNNGSQAVGRSSFYCLEYFPSQMLRTGNNFTFSYTFEEVPFHSSYAHSQSLDRLMNPLIDQYLYYLNRTQNQSGSAQNKDLLFSRGSPAGMSVQPKNWLPGPCYRQQRVSKTKTDNNNSNFTWTGASKYNLNGRESIINPGTAVASHKDDEDKFFPMSGVMIFGKESAGASSTALDNVMITDEEEIKATNPVATERFGTVAVNFQSSSTDPATGDVHAMGALPGMVWQDRDVYLQGPIWAKIPHTDGHFHPSPLMGGFGLKNPPPQILIKNTPVPANPPAEFSATKFASFITQYSTGQVSVEIEWELQKENSKRWNPEVQYTSNYAKSANVDFTVDNNGLYTEPRPIGTRYLTRPL

SEQ ID NO: 289 - DNA, 2211 bp, Artificial Sequence
  source: /note="Description of Artificial Sequence: Synthetic polynucleotide"
atggctgccgatggttatcttccagattggctcgaggacaacctctctgagggcattcgcgagtggtgggacttgaaacctggagccccgaagcccaaagccaaccagcaaaagcaggacgacggccggggtctggtgcttcctggctacaagtacctcggacccttcaacggactcgacaagggggagcccgtcaacgcggcggacgcagcggccctcgagcacgacaaggcctacgaccagcagctcaaagcgggtgacaatccgtacctgcggtataaccacgccgacgccgagtttcaggagcgtctgcaagaagatacgtcttttgggggcaacctcgggcgagcagtcttccaggccaagaagcgggttctcgaacctctcggtctggttgaggaaggcgctaagacggctcctggaaagaaacgtccggtagagcagtcgccacaagagccagactcctcctcgggcatcggcaagacaggccagcagcccgctaaaaagagactcaattttggccagactggcgactcagagtcagtccccgatccacaacctctcggagaacctccagcaacccccgctgctgtgggacctactacaatggcttcaggcggtggcgcaccaatggcagacaataacgaaggcgccgacggagtgggtaatgcctcaggaaattggcattgcgattccacatggctgggcgacagagtcatcaccaccagcacccgcacctgggccttgcccacctacaataaccacctctacaagcaaatctccagtacttcaacgggggccagcaacgacaaccactacttcggctacggcaccccctgggggtattttgatttcaacagattccactgccacttttcaccacgtgactggcagcgactcatcaacaacaattggggattccggcccaagagactcaacttcaaactcttcaacatccaagtcgaggaggtcacgacgaatgatggcgtcacaaccatcgctaataaccttaccagcacggttcaagtcttctcggactcggagtaccagcttccgtacgtcctcggctctgcgcaccagggctgcctccctccgttcccggcggacgtgttcatgattccgcaatacggctacctgacgctcaacaatggcagccaagccgtgggacgttcatccttttactgcctggaatatttcccttctcagatgctgagaacgggcaacaactttaccttcagctacacctttgaggaagtgcctttccacagcagctacgcgcacagccagagcctggaccggctgatgaatcctctcatcgaccaatacctgtattacctgaacagaacacaaaatcagtccggaagtgcccaaaacaaggacttgctgtttagccgtgggtctccagctggcatgtctgttcagcccaaaaactggctacctggaccctgttatcggcagcagcgcgtttctaaaacaaaaacagacaacaacaacagcaattttacctggactggtgcttcaaaatataacctcaatgggcgtgaatccatcatcaaccctggcaccgctgtggcctcacacaaagacgacgaagacaagttctttcccatgagcggtgtcatgatttttggaaaagagagcgccggagcttcaagcactgcattggacaatgtcatgattacagacgaagaggaaattaaagccactaaccctgtggccaccgaaagatttgggaccgtggcagtcaatttccagagcagcagcacagaccctgcgaccggagatgtgcatgctatgggagcattacctggcatggtgtggcaagatagagacgtgtacctgcagggtcccatttgggccaaaattcctcacacagatggacactttcacccgtctcctcttatgggcggctttggactcaagaacccgcctcctcagatcctcatcaaaaacacgcctgttcctgcgaatcctccggcggagttttcagctacaaagtttgcttcattcatcacccaatactccacaggacaagtgagtgtggaaattgaatgggagctgcagaaagaaaacagcaagcgctggaatcccgaagtgcagtacacatccaattatgcaaaatctgccaacgttgattttactgtggacaacaatggactttatactgagcctcgccccattggcacccgttaccttacccgtcccctgtaa

SEQ ID NO: 290 - protein, 737 aa, Artificial Sequence
  source: /note="Description of Artificial Sequence: Synthetic polypeptide"
RMAADGYLPDWLEDNLSEGIREWWDLKPGAPKPKANQQKQDDGRGLVLPGYKYLGPFNGLDKGEPVNAADAAALEHDKAYDQQLKAGDNPYLRYNHADAEFQERLQEDTSFGGNLGRAVFQAKKRVLEPLGLVEEGAKTAPGKKRPVEQSPQEPDSSSGIGKTGQQPAKKRLNFGQTGDSESVPDPQPLGEPPATPAAVGPTTMASGGGAPMADNNEGADGVGNASGNWHCDSTWLGDRVITTSTRTWALPTYNNHLYKQISSTSTGASNDNHYFGYSTPWGYFDFNRFHCHFSPRDWQRLINNNWGFRPKRLNFKLFNIQVEEVTTNDGVTTIANNLTSTVQVFSDSEYQLPYVLGSAHQGCLPPFPADVFMIPQYGYLTLNNGSQAVGRSSFYCLEYFPSQMLRTGNNFTFSYTFEEVPFHSSYAHSQSLDRLMNPLIDQYLYYLNRTQNQSGSAQNKDLLFSRGSPAGMSVQPKNWLPGPCYRQQRVSKTKTDNNNSNFTWTGASKYNLNGRESIINPGTAVASHKDDEDKFFPMSGVMIFGKESAGASSTALDNVMITDEEEIKATNPVATERFGTVAVNFQSSSTDPATGDVHAMGALPGMVWQDRDVYLQGPIWAKIPHTDGHFHPSPLMGGFGLKNPPPQILIKNTPVPANPPAEFSATKFASFITQYSTGQVSVEIEWELQKENSKRWNPEVQYTSNYAKSANVDFTVDNNGLYTEPRPIGTRYLTRPL

SEQ ID NO: 291 - protein, 737 aa, Artificial Sequence
  source: /note="Description of Artificial Sequence: Synthetic polypeptide"
RMAADGYLPDWLEDNLSEGIREWWDLKPGAPKPKANQQKQDDGRGLVLPGYKYLGPFNGLDKGEPVNAADAAALEHDKAYDQQLKAGDNPYLRYNHADAEFQERLQEDTSFGGNLGRAVFQAKKRVLEPLGLVEEGAKTAPGKKRPVEQSPQEPDSSSGIGKTGQQPAKKRLNFGQTGDSESVPDPQPLGEPPATPAAVGPTTMASGGGAPMADNNEGADGVGNASGNWHCDSTWLGDRVITTSTRTWALPTYNNHLYKQISSTSTGASNDNHYFGYSTPWGYFDFNRFHCHFSPRDWQRLINNNWGFRPKRLNFKLFNIQVKEVTTNDGVTTIANNLTSTVQVFSDSEYQLPYVLGSAHQGCLPPFPADVFMIPQYGYLTLNNGSQAVGRSSFYCLEYFPSQMLRTGNNFTFSYTFEEVPFHSSYAHSQSLDRLMNPLIDQYLYYLNRTQNQSGSAQNKDLLFSRGSPAGMSVQPKNWLPGPCYRQQRVSKTKTDNNNSNFTWTGASKYNLNGRESIINPGTAVASHKDDEDKFFPMSGVMIFGKESAGASSTALDNVMITDEEEIKATNPVATERFGTVAVNFQSSSTDPATGDVHAMGALPGMVWQDRDVYLQGPIWAKIPHTDGHFHPSPLMGGFGLKNPPPQILIKNTPVPANPPAEFSATKFASFITQYSTGQVSVEIEWELQKENSKRWNPEVQYTSNYAKSANVDFTVDNNGLYTEPRPIGTRYLTRPL

SEQ ID NO: 292 - protein, 737 aa, Artificial Sequence
  source: /note="Description of Artificial Sequence: Synthetic polypeptide"
RMAADGYLPDWLEDNLSEGIREWWDLKPGAPKPKANQQKQDDGRGLVLPGYKYLGPFNGLDKGEPVNAADAAALEHDKAYDQQLKAGDNPYLRYNHADAEFQERLQEDTSFGGNLGRAVFQAKKRVLEPLGLVEEGAKTAPGKKRPVEQSPQEPDSSSGIGKTGQQPAKKRLNFGQTGDSESVPDPQPLGEPPATPAAVGPTTMASGGGAPMADNNEGADGVGNASGNWHCDSTWLGDRVITTSTRTWALPTYNNHLYKQISSTSTGASNDNHYFGYSTPWGYFDFNRFHCHFSPRDWQRLINNNWGFRPKRLNFKLFNIQVKEVTTNDGVTTIANNLTSTVQVFSDSEYQLPYVLGSAHQGCLPPFPADVFMIPQYGYLTLNNGSQAVGRSSFYCLEYFPSQMLRTGNNFTFSYTFEEVPFHSSYAHSQSLDRLMNPLIDQYLYYLNRTQNQSGSAQNKDLLFSRGSPAGMSVQPKNWLPGPCYRQQRVSKTKTDNNNSNFTWTGASKYNLNGRESIINPGTAVASHKDDEDKFFPMSGVMIFGKESAGANSTALDNVMITDEEEIKATNPVATERFGTVAVNFQSSSTDPATGDVHAMGALPGMVWQDRDVYLQGPIWAKIPHTDGHFHPSPLMGGFGLKNPPPQILIKNTPVPANPPAEFSATKFASFITQYSTGQVSVEIEWELQKENSKRWNPEVQYTSNYAKSANVDFTVDNNGLYTEPRPIGTRYLTRPL

SEQ ID NO: 293 - DNA, 2208 bp, Artificial Sequence
  source: /note="Description of Artificial Sequence: Synthetic polynucleotide"
atggctgccgatggttatcttccagattggctcaaggacactctctctgaaggaataagacagtggtggaagctcaaacctggcccaccaccaccaaagcccgcagagcggcataaggacgacagcgggggtcttgtgcttcctgggtacaagtacctcggacccttcaacggactcgacaagggagagccggtcaacgaggcagacgccgcggccctcgagtacgacaaggcctacgaccggcagctcgacagcggagacaacccgtacctcaagtacaaccacgccgacgcggagtttcaggagcgccttaaagaagatacgtcttttgggggcaacctcggacgagcagtcttccaggcgaaaaagagggttcttgaacctctgggcctggttgaggaacctgttaagacggctccgggaaaaaagaggccggtagagcactctcctgtggagccagactcctcctcgggaacaggaaaagcgggccagcagcctgcgagaaagagattgaattttggtcagactggagacgcagactccgtacctgacccccagcctctcggacagccaccagcagccccctctggtctgggaactaatacgatggctacaggcagtggcgcaccaatggcagacaataacgagggcgccgacggagtgggtaattcctcgggaagttggcattgcgattccacatggatgggcgacagagtcatcaccaccagcacccgaacctgggctctgcccacctacaacaaccatctgtacaagcagatctccagccaatcaggagccagcaacgacaaccactactttggctacagcaccccttgggggtattttgacttcaacagattccactgccacttttcaccacgtgactggcaaagactcatcaacaacaactggggattccggcccaagagactcaacttcaagctctttaacattcaagtcaaggaggtcacgcagaatgacggtacgacgacgattgccaataaccttaccagcacggttcaggtgtttactgactcggagtaccagctcccgtacgtccccggctcggcgcatcaaggatgcctcccgccgttcccagcagacgtcttcatggtgccacagtatggatacctcaccctgaacaacgggagtcaggcagtaggacgctcttcattttactgcctggagtactttccttctcagatgcttcgtaccggaaacaactttaccttcagctacacctttgaggatgttcctttccacagcagctacgctcacagccagagtttggaccgtctcatgaatcctctcatcgaccagtacctgtattacttgagcagaacaaacactccaagcggaaccaccacgcagtccaggcttcagttttctcaggccggagcaagtgacattcgggaccagtctaggaactggcttcctggaccctgttaccgccagcagcgagtatcaaagacagctgcggacaacaacaacagtgaatactcgtggactggagctaccaagtaccacctcaatggcagagactctctggtgaatccgggcccggccatggccagccacaaggacgatgaagaaaagttttttcctcaaagcggggttctcatctttgggaagcaaggctcagagaaaacaaatgtggacattgaaaaggtcatgattacagacgaagaggaaatcagaaccaccaatcccgtggccacggagcagtatggttctgtatctaccaacctccagagcggcaacacacaagcagctactgcagatgtcaacacacaaggcgttcttccaggcatggtctggcaggacagagacgtgcacctgcaggggcctatctgggcaaagattccacacacggacggacattttcacccctctcccctcatgggcggatttggacttaaacaccctcctccacagattctcatcaagaacaccccggtacctgcaaatccttcgaccaccttcagtgcggcaaagtttgcttccttcatcacacagtattccacagggcaggtcagcgtggagatcgagtgggagctgcagaaggagaacagcaaacgctggaaccccgagatccagtacacttccaactacaacaaatctgttaatgtggactttactgtggacactaatggtgtgtattcagagcctcgccccattggcaccagatacctgactcgtaatctgtaa

SEQ ID NO: 294 - protein, 735 aa, Artificial Sequence
  source: /note="Description of Artificial Sequence: Synthetic polypeptide"
MAADGYLPDWLKDTLSEGIRQWWKLKPGPPPPKPAERHKDDSGGLVLPGYKYLGPFNGLDKGEPVNEADAAALEYDKAYDRQLDSGDNPYLKYNHADAEFQERLKEDTSFGGNLGRAVFQAKKRVLEPLGLVEEPVKTAPGKKRPVEHSPVEPDSSSGTGKAGQQPARKRLNFGQTGDADSVPDPQPLGQPPAAPSGLGTNTMATGSGAPMADNNEGADGVGNSSGSWHCDSTWMGDRVITTSTRTWALPTYNNHLYKQISSQSGASNDNHYFGYSTPWGYFDFNRFHCHFSPRDWQRLINNNWGFRPKRLNFKLFNIQVKEVTQNDGTTTIANNLTSTVQVFTDSEYQLPYVPGSAHQGCLPPFPADVFMVPQYGYLTLNNGSQAVGRSSFYCLEYFPSQMLRTGNNFTFSYTFEDVPFHSSYAHSQSLDRLMNPLIDQYLYYLSRTNTPSGTTTQSRLQFSQAGASDIRDQSRNWLPGPCYRQQRVSKTAADNNNSEYSWTGATKYHLNGRDSLVNPGPAMASHKDDEEKFFPQSGVLIFGKQGSEKTNVDIEKVMITDEEEIRTTNPVATEQYGSVSTNLQSGNTQAATADVNTQGVLPGMVWQDRDVHLQGPIWAKIPHTDGHFHPSPLMGGFGLKHPPPQILIKNTPVPANPSTTFSAAKFASFITQYSTGQVSVEIEWELQKENSKRWNPEIQYTSNYNKSVNVDFTVDTNGVYSEPRPIGTRYLTRNL

SEQ ID NO: 295 - DNA, 2208 bp, Artificial Sequence
  source: /note="Description of Artificial Sequence: Synthetic polynucleotide"
atggctgccgatggttatcttccagattggctcgaggacactctctctgaaggaataagacagtggtggaagctcaaacctggcccaccaccaccaaagcccgcagagcggcataaggacgacagcaggggtcttgtgcttcctgggtacaagtacctcggacccttcaacggactcgacaagggggagccggtcaacgaggcagacgccgcggccctcgagcacgacaaggcctacgaccggcagctcgacagcggagacaacccgtacctcaagtacaaccacgccgacgcagagtttcaggagcgccttaaagaagatacgtcttttgggggcaacctcggacgagcagtcttccaggcgaaaaagagggttcttgaacctctgggcctggttgaggaacctgttaagacggctccgggaaaaaagaggccggtagagcactctcctgtggagccagactcctcctcgggaaccggaaaagcgggccagcagcctgcaagaaaaagattaaattttggtcagactggagacgcagactccgtacctgacccccagcctctcggacagccaccagcagccccctctggtctgggatctactacaatggctacaggcagtggcgcaccaatggcagacaataacgagggtgccgatggagtgggtaattcctcaggaaattggcattgcgattcccaatggctgggcgacagagtcatcaccaccagcacccgaacctgggccctgcccacatacaacaaccacctctacaagcaaatctccagccaatcaggagccagcaacgacaaccactactttggctacagcaccccctgggggtattttgacttcaacagattccactgccacttttcaccacgtgactggcaaagactcatcaacaacaactggggattccggcccaaaagactcaacttcaagctctttaatattcaagtcaaagaggtcacgcagaatgacggtacgacgacgattgccaataaccttaccagcacggttcaggtgtttactgactcggagtaccagctcccgtacgtcctgggctcggcgcatcaaggatgcctcccgccgtttccagcggacgtcttcatggtcccacagtatggatacctcaccctgaacaacgggagtcaggcggtaggacgctcttccttttactgcctggagtactttccttctcagatgctgcgtactggaaacaactttcagttcagctacacttttgaagacgtgcctttccacagcagctacgctcacagccagagtctggatcggctgatgaatcctctgatcgaccagtacctgtattatctgaacaagacacaaacaaatagtggaactcttcagcagtctcggctactgtttagccaagctggaccaaccaacatgtctcttcaagctaaaaactggctgcctggaccttgctacagacagcagcgtctgtcaaaacaggcaaacgacaacaacaacagcaactttccctggactgcagctacaaagtatcatctaaatggccgggactcgttggttaatccaggaccagctatggccagtcgcaaggatgacgaagaaaagtttttccccatgcatggaaccctgatatttggtaaacaaggaacaaatgccaacgacgcggatttggaaaatgtcatgattacagatgaagaagaaatcagggccaccaatcccgtggctacggagcagtacgggactgtgtcaaataatttgcaaaactcaaacactggtccaactactggaactgtcaatcaccaaggagcgttacctggtatggtgtggcaggatcgagacgtgtacctgcagggacccatttgggccaagattcctcacaccgatggacactttcatccttctccactgatgggaggttttggactcaaacacccgcctcctcagatcatgatcaaaaacactcccgttccagccaatcctcccacaaacttcagttctgccaagtttgcttctttcatcacacagtattccacgggacaggtcagcgtggagatcgagtgggagctgcagaaggagaacagcaaacgctggaatcccgaaattcagtacacttccaactacaacaagtctgttaatgtggactttactgtggacactaatggtgtgtattcagagcctcgccccattggcaccagatacctgactcgtaatctgtaa

SEQ ID NO: 296 - protein, 735 aa, Artificial Sequence
  source: /note="Description of Artificial Sequence: Synthetic polypeptide"
MAADGYLPDWLEDTLSEGIRQWWKLKPGPPPPKPAERHKDDSRGLVLPGYKYLGPFNGLDKGEPVNEADAAALEHDKAYDRQLDSGDNPYLKYNHADAEFQERLKEDTSFGGNLGRAVFQAKKRVLEPLGLVEEPVKTAPGKKRPVEHSPVEPDSSSGTGKAGQQPARKRLNFGQTGDADSVPDPQPLGQPPAAPSGLGSTTMATGSGAPMADNNEGADGVGNSSGNWHCDSQWLGDRVITTSTRTWALPTYNNHLYKQISSQSGASNDNHYFGYSTPWGYFDFNRFHCHFSPRDWQRLINNNWGFRPKRLNFKLFNIQVKEVTQNDGTTTIANNLTSTVQVFTDSEYQLPYVLGSAHQGCLPPFPADVFMVPQYGYLTLNNGSQAVGRSSFYCLEYFPSQMLRTGNNFQFSYTFEDVPFHSSYAHSQSLDRLMNPLIDQYLYYLNKTQTNSGTLQQSRLLFSQAGPTNMSLQAKNWLPGPCYRQQRLSKQANDNNNSNFPWTAATKYHLNGRDSLVNPGPAMASRKDDEEKFFPMHGTLIFGKQGTNANDADLENVMITDEEEIRATNPVATEQYGTVSNNLQNSNTGPTTGTVNHQGALPGMVWQDRDVYLQGPIWAKIPHTDGHFHPSPLMGGFGLKHPPPQIMIKNTPVPANPPTNFSSAKFASFITQYSTGQVSVEIEWELQKENSKRWNPEIQYTSNYNKSVNVDFTVDTNGVYSEPRPIGTRYLTRNL

SEQ ID NO: 297 - DNA, 2208 bp, Artificial Sequence
  source: /note="Description of Artificial Sequence: Synthetic polynucleotide"
atggctgccgatggttatcttccagattggctcgaggacactctctctgaaggaataagacagtggtggaagctcaaacctggcccaccaccaccaaagcccgcagagcggcataaggacgacagcaggggtcttgtgcttcctgggtacaagtacctcggacccttcaacggactcgacaagggagagccggtcaacgaggcagacgccgcggccctcgagcacgacaaagcctacgaccggcagctcgacagcggagacaacccgtacctcaagtacaaccacgccgacgcggagtttcaggagcgccttaaagaagatacgtcttttgggggcaacctcggacgagcagtcttccaggcgaaaaagagggttcttgaacctctgggcctggttggggaacctgtcaagacggctccaggaaaaaagaggccggtagagcactctcctgtggagccagactcctcctcgggaaccggaaaggcgggccagcagcctgcaagaaaaagattgaattttggtcagactggagacgcagactcagtacctgacccccagcctctcggacagccaccagcagccccctctggtctgggaactaatacgatggctacaggcagtggcgcaccaatggcagacaataacgagggcgccgacggagtgggtaattcctcgggaaattggcattgcgattccacatggatgggcgacagagtcatcaccaccagcacccgaacctgggccctgcccacctacaacaaccacctctacaaacaaatttccagccaatcaggagcctcgaacgacaatcactactttggctacagcaccccttgggggtattttgacttcaacagattccactgccacttttcaccacgtgactggcaaagactcatcaacaacaactggggattccgacccaagagactcaacttcaagctctttaacattcaagtcaaagaggtcacgcagaatgacggtacgacgacgattgccaataaccttaccagcacggttcaggtgtttactgactcggagtaccagctcccgtacgtcctcggctcggcgcatcaaggatgcctcccgccgttcccagcagacgtcttcatggtgccacagtatggatacctcaccctgaacaacgggagtcaggcagtaggacgctcttcattttactgcctggagtactttccttctcagatgctgcgtaccggaaacaactttaccttcagctacacttttgaggacgttcctttccacagcggctacgctcacagccagagtctggaccgtctcatgaatcctctcatcgaccagtacctgtattacttgagcacaacaaacactccaagtggaaccaccacgcagtcaaggcttcagttttctcaggccggagcgagtgacattcgggaccagtctaggaactggcttcctggaccctgttaccgccagcagcgagtatcaaagacatctgcggataacaacaacagtgaatactcgtggactggagctaccaagtaccacctcaatggcagagactctctggtgaatccgggcccggccatggcaagccacaaggacaatgaagaaaagttttttcctcagagcggggttctcatctttgggaagcaaggctcagagaaaacaaatgtggacattgaaaaggtcatgattacagacgaagaggaaatcaggacaaccaatcccgtggctacggagcagtacggttctgtatctaccaacctccagagaggcaacagacaagcagctaccgcagatgtcaacacacaaggcgttcttccaggcatggtctggcaggacagagatgtgtaccttcaggggcccatctgggcaaagattccacacacggacggacattttcacccctctcccctcatgggtggattcggacttaaacaccctcctccacagattctcatcaagaacaccccggtacctgcgaatccttcgaccaccttcagtgcggcaaagtttgcttccttcatcacacagtactccacgggacaggtcagcgtggagatcgagtgggagctgcagaaggaaaacagcaaacgctggaatcccgaaattcagtacacttccaactacaacaagtctgttaatgtggactttactgtggacactaatggcgtgtattcagagcctcgccccattggcaccagatacctgactcgtaatctgtaa

SEQ ID NO: 298 - protein, 735 aa, Artificial Sequence
  source: /note="Description of Artificial Sequence: Synthetic polypeptide"
MAADGYLPDWLEDTLSEGIRQWWKLKPGPPPPKPAERHKDDSRGLVLPGYKYLGPFNGLDKGEPVNEADAAALEHDKAYDRQLDSGDNPYLKYNHADAEFQERLKEDTSFGGNLGRAVFQAKKRVLEPLGLVGEPVKTAPGKKRPVEHSPVEPDSSSGTGKAGQQPARKRLNFGQTGDADSVPDPQPLGQPPAAPSGLGTNTMATGSGAPMADNNEGADGVGNSSGNWHCDSTWMGDRVITTSTRTWALPTYNNHLYKQISSQSGASNDNHYFGYSTPWGYFDFNRFHCHFSPRDWQRLINNNWGFRPKRLNFKLFNIQVKEVTQNDGTTTIANNLTSTVQVFTDSEYQLPYVLGSAHQGCLPPFPADVFMVPQYGYLTLNNGSQAVGRSSFYCLEYFPSQMLRTGNNFTFSYTFEDVPFHSGYAHSQSLDRLMNPLIDQYLYYLSTTNTPSGTTTQSRLQFSQAGASDIRDQSRNWLPGPCYRQQRVSKTSADNNNSEYSWTGATKYHLNGRDSLVNPGPAMASHKDNEEKFFPQSGVLIFGKQGSEKTNVDIEKVMITDEEEIRTTNPVATEQYGSVSTNLQRGNRQAATADVNTQGVLPGMVWQDRDVYLQGPIWAKIPHTDGHFHPSPLMGGFGLKHPPPQILIKNTPVPANPSTTFSAAKFASFITQYSTGQVSVEIEWELQKENSKRWNPEIQYTSNYNKSVNVDFTVDTNGVYSEPRPIGTRYLTRNL

SEQ ID NO: 299 - DNA, 2208 bp, Artificial Sequence
  source: /note="Description of Artificial Sequence: Synthetic polynucleotide"
atggctgccgatggttatcttccagattggctcgaggacactctctctgaaggaataagacagtggtggaagctcaaacctggcccaccaccaccaaagcccgcagagcggcataaggacgacagcaggggtcttgtgcttcctgggtacaagtacctcggacccttcaacggactcgacaagggagagccggtcaacgaggcagacgccgcggccctcgagcacgacaaagcctacgaccggcagctcgacagcggagacaacccgtacctcaagtacaaccacgccgacgcggagtttcaggagcgccttaaagaagatacgtcttttgggggcaacctcggacgagcagtcttccaggcgaaaaagagggttcttgaacctctgggcctggttggggaacctgttaagacggctccgggaaaaaagaggccggtagagcactctcctgtggagccagactcctcctcgggaaccggaaaggcgggccagcagcctgcaagaaaaagattgaattttggtcagactggagacgcagactcagtacctgacccccagcctctcggacagccaccagcagccccctctggtctgggaactaatacgatggctacaggcagtggcgcaccaatggcagacaataacgagggcgccgacggagtgggtaattcctcgggaaatcggcattgcgattccacatggatgggcgacagagtcatcaccaccagcacccgaacctgggccctgcccacctacaacaaccacctctacagacaaatttccagccaatcaggagcctcgaacgacaatcactactttggctacagcaccccttgggggtattttgacttcaacagattccactgccacttttcaccacgtgactggcaaagactcatcaacaacaactggggattccgacccaagagactcaacttcaagctctttaacattcaagtcaaagaggtcacgcagaatgacggtacgacgacgattgccaataaccttaccagcacggttcaggtgtttactgactcggagtaccagctcccgtacgtcctcggctcggcgcatcaaggatgcctcccgccgttcccagcagacgtcttcatggtgccacagtatggatacctcaccctgagcaacgggagtcaggcagtaggacgctcttcattttactgcccggagtactttccttctcagatgctgcgtaccggaaacaactttaccttcagctacacttttgaggacgttcctttccacagcagctacgctcacagccagagtctggaccgtctcatgaatcctctcatcgaccagtacctgtattacttgagcacaacaaacactccaagtggaaccaccacgcagtcaaggcttcagttttctcaggccggagcgagtgacattcgggaccagtctaggaactggcttcctggaccctgttaccgccagcagcgagtatcaaagacatctgcggataacaacaacagtgaatactcgtggactggagctaccaagtaccacctcaatggcagagactctctggtgaatccgggcccggccatggcaagccacaaggacaatgaagaaaagttttttcctcagagcggggttctcatctttgggaagcaaggctcagagaaaacaaatgtggacattgaaaaggtcatgattacagacgaagaggaaatcaggacaaccaatcccgtggctacggagcagtatggttctgtatctaccaacctccagagaggcaacagacaagcagctaccgcagatgtcaacacacaaggcgttcttccaggcatggtctggcaggacagagatgtgtaccttcaggggcccatctgggcaaagattccacacacggacggacattttcacccctctcccctcatgggtggattcggacctaaacaccctcctccacagattctcatcaagaacaccccggtacctgcgaatccttcgaccaccttcagtgcggcaaagtttgcttccttcatcacacagtactccacgggacaggtcagcgtggagatcgagtgggagctgcagaaggaaaacagcaaacgctggaatcccgaaattcagtacacttccaactacaacaagtctgttaatgtggactttactgtggacactaatggcgtgtattcagagcctcgccccattggcaccagatacctgactcgtaatttgtaa

SEQ ID NO: 300 - protein, 735 aa, Artificial Sequence
  source: /note="Description of Artificial Sequence: Synthetic polypeptide"
MAADGYLPDWLEDTLSEGIRQWWKLKPGPPPPKPAERHKDDSRGLVLPGYKYLGPFNGLDKGEPVNEADAAALEHDKAYDRQLDSGDNPYLKYNHADAEFQERLKEDTSFGGNLGRAVFQAKKRVLEPLGLVGEPVKTAPGKKRPVEHSPVEPDSSSGTGKAGQQPARKRLNFGQTGDADSVPDPQPLGQPPAAPSGLGTNTMATGSGAPMADNNEGADGVGNSSGNRHCDSTWMGDRVITTSTRTWALPTYNNHLYRQISSQSGASNDNHYFGYSTPWGYFDFNRFHCHFSPRDWQRLINNNWGFRPKRLNFKLFNIQVKEVTQNDGTTTIANNLTSTVQVFTDSEYQLPYVLGSAHQGCLPPFPADVFMVPQYGYLTLSNGSQAVGRSSFYCPEYFPSQMLRTGNNFTFSYTFEDVPFHSSYAHSQSLDRLMNPLIDQYLYYLSTTNTPSGTTTQSRLQFSQAGASDIRDQSRNWLPGPCYRQQRVSKTSADNNNSEYSWTGATKYHLNGRDSLVNPGPAMASHKDNEEKFFPQSGVLIFGKQGSEKTNVDIEKVMITDEEEIRTTNPVATEQYGSVSTNLQRGNRQAATADVNTQGVLPGMVWQDRDVYLQGPIWAKIPHTDGHFHPSPLMGGFGPKHPPPQILIKNTPVPANPSTTFSAAKFASFITQYSTGQVSVEIEWELQKENSKRWNPEIQYTSNYNKSVNVDFTVDTNGVYSEPRPIGTRYLTRNL

SEQ ID NO: 301 - DNA, 2205 bp, Artificial Sequence
  source: /note="Description of Artificial Sequence: Synthetic polynucleotide"
atggctgccgatggttatcttccagattggctcgaggacactctctctgaaggaataagacagtggtggaagctcaaacctggcccaccaccaccaaagcccgcagagcggcataaggacgacagcaggggtcttgtgcttcctgggtacaagtacctcggacccttcaacggactcgacaagggagagccggtcaacgaggcagacgccgcggccctcgagcacgacaaggcctacgaccggcagctcgacagcggagacaacccgtacctcaagtacaaccacgccgacgcggagtttcaggagcgtcttaaagaagatacgtcttttgggggcaacctcggacgagcagtcttccaggcgaaaaagagggttcttgaacctctgggcctggttgaggaacctgttaagacggctccgggaaaaaagaggccggtagagcactctcctgcggagccagactcctcctcgggaaccggaaaagcgggccagcagcctgcaagaaaaagactgaatttcggtcagactggagacgcagactccgtacctgacccccagcctctcagacagccaccagcagcccccacaagtttgggatctactacaatggctacaggcagtggcgcaccaatggcagacaataacgagggtgccgatggagtgggtaattcctcaggaaattggcattgcgattcccaatggctgggcgacagagtcatcaccaccagcacccgaacctgggccctgcccacctacaacaaccacctttacaagcaaatctccagccaatcaggagcctcaaacgacaaccactactttggctacagcaccccctgggggtattttgacttcaacagattccactgccacttttcaccacgtgactggcaaagactcatcaacaacaactggggattccgacccaagagactcaacttcaagctctttaacattcaagtcaaagaggtcacgcagaatgacggtacgacgacgattgccaataaccttaccagcacggttcaggtgtttactgactcggagtaccagctcccgtacgtcctcggctcggcgcatcaaggatgcctcccgccgtttccagcggacgtcttcatggtcccacagtatggatacctcaccctgaacaacgggagtcaggcggtaggacgctcttccttttactgcctggagtactttccttctcagatgctgcgtactggaaacaactttcagttcagctacacttttgaagacgtgcctttccacagcagctacgctcacagccagagtttggatcggctgatgaatcctctgatcgaccagtacctgtattatctaaacagaacacaaacagctagtggaactcagcagtctcggctactgtttagccaagctggacccacaagcatgtctcttcaagctaaaaactggctgcctggaccgtgttatcgccagcagcgtttgtcaaagcaggcaaacgacaacaacaacagcaactttccctggactggagctaccaagtactacctcaatggcagagactctttggtgaacccgggcccggccatggccagccacaaggacgatgaagaaaagtttttccccatgcatggaaccctaatatttggtaaagaaggaacaaatgctaccaacgcggaattggaaaatgtcatgattacagatgaagaggaaatcaggaccaccaatcccgtggctacagagcagtacggatatgtgtcaaataatttgcaaaactcaaatactgctgcaagtactgaaactgtgaatcaccaaggagcattacctggtatggtgtggcaggatcgagacgtgtacctgcagggacccatttgggccaagattcctcacaccgatggacactttcatccttctccactgatgggaggttttggactcaaacacccgcctcctcagattatgatcaaaaacactcccgttccagccaatcctcccacaaacttcagttctgccaagtttgcttccttcatcacacagtattccacgggacaggtcagcgtggagatcgagtgggagctgcagaaggagaacagcaaacgctggaatcccgaaattcagtacacttccaactacaacaaatctgttaatgtggactttactgtggacactaatggtgtgtattcagagcctcgccccattggcaccagatacctgactcgtaatctgtaa

SEQ ID NO: 302 - protein, 734 aa, Artificial Sequence
  source: /note="Description of Artificial Sequence: Synthetic polypeptide"
MAADGYLPDWLEDTLSEGIRQWWKLKPGPPPPKPAERHKDDSRGLVLPGYKYLGPFNGLDKGEPVNEADAAALEHDKAYDRQLDSGDNPYLKYNHADAEFQERLKEDTSFGGNLGRAVFQAKKRVLEPLGLVEEPVKTAPGKKRPVEHSPAEPDSSSGTGKAGQQPARKRLNFGQTGDADSVPDPQPLRQPPAAPTSLGSTTMATGSGAPMADNNEGADGVGNSSGNWHCDSQWLGDRVITTSTRTWALPTYNNHLYKQISSQSGASNDNHYFGYSTPWGYFDFNRFHCHFSPRDWQRLINNNWGFRPKRLNFKLFNIQVKEVTQNDGTTTIANNLTSTVQVFTDSEYQLPYVLGSAHQGCLPPFPADVFMVPQYGYLTLNNGSQAVGRSSFYCLEYFPSQMLRTGNNFQFSYTFEDVPFHSSYAHSQSLDRLMNPLIDQYLYYLNRTQTASGTQQSRLLFSQAGPTSMSLQAKNWLPGPCYRQQRLSKQANDNNNSNFPWTGATKYYLNGRDSLVNPGPAMASHKDDEEKFFPMHGTLIFGKEGTNATNAELENVMITDEEEIRTTNPVATEQYGYVSNNLQNSNTAASTETVNHQGALPGMVWQDRDVYLQGPIWAKIPHTDGHFHPSPLMGGFGLKHPPPQIMIKNTPVPANPPTNFSSAKFASFITQYSTGQVSVEIEWELQKENSKRWNPEIQYTSNYNKSVNVDFTVDTNGVYSEPRPIGTRYLTRNL

SEQ ID NO: 303 - DNA, 3160 bp, Artificial Sequence
  source: /note="Description of Artificial Sequence: Synthetic polynucleotide"
acccttcactaaagggactagtcctgcaggtttaaacgaattcgcccttgctgcgtcaactggaccaatgagaactttcccttcaacgactgtgtcgacaagatggtgatttggtgggaggaggggaagatgaccgccaaggtcgtggagtcggccaaagccattctcggaggaagcaaggtgcgcgtggaccagaaatgcaagtcctcggcccagatagatccgactcccgtgatcgtcacctccaacaccaacatgtgcgccgtgattgacgggaactcaacgaccttcgaacaccagcagccgttgcaagaccggatgttcaaatttgaactcacccgccgtctggatcatgactttgggaaggtcaccaagcgggaagtcaaagactttttccggtgggcaaaggatcacgtggttgaggtggagcatgaattctacgtcaaaaagggtggagccaagaaaagacccgcccctagtgacgcagatataagtgagcccaaacgggtgcgcgagtcagttgcgcagccatcgacgtcagacgcggaagcttcgatcaactacgcggacaggtaccaaaacaaatgttctcgtcacgtgggcatgaatctgatgctgtttccctgcagacaatgcgagagaatgaatcaaaattcaaatatctgcttcactcacggacagaaagactgtttagagtgctttcccgtgtcagaatctcaacctgtttctgtcgtcaaaaaggcgtatcagaaactgtgctacattcatcatatcatgggaaaggtgccagacgcttgcactgcctgcgatctggtcaatgtggatttggatgactgcatctctgaacaataaatgatttaaatcaggtatggctgccgatggttatcttccagattggctcgaggacactctctctgaaggaataagacagtggtggaagctcaaacctggcccaccaccaccaaagcccgcagagcggcataaggacgacagcaggggtcttgtgcttcctgggtacaagtacctcggacccttcaacggactcgacaagggagagccggtcaacgaggcagacgccgcggccctcgagcacgacaaggcctacgaccggcagctcgacagcggagacaacccgtacctcaagtacaaccacgccgacgcggagtttcaggagcgtcttaaagaagatacgtcttttgggggcaacctcggacgagcagtcttccaggcgaaaaagagggttcttgaacctctgggcctggttgaggaacctgttaagacggctccgggaaaaaagaggccggtagagcactctcctgcggagccagactcctcctcgggaaccggaaaagcgggccagcagcctgcaagaaaaagactgaatttcggtcagactggagacgcagactccgtacctgacccccagcctctcagacagccaccagcagcccccacaagtttgggatctactacaatggctacaggcagtggcgcaccaatggcagacaataacgagggtgccgatggagtgggtaattcctcaggaaattggcattgcgattcccaatggctgggcgacagagtcatcaccaccagcacccgaacctgggccctgcccacctacaacaaccacctttacaagcaaatctccagccaatcaggagcctcaaacgacaaccactactttggctacagcaccccctgggggtattttgacttcaacagattccactgccacttttcaccacgtgactggcaaagactcatcaacaacaactggggattccgacccaagagactcaacttcaagctctttaacattcaagtcaaagaggtcacgcagaatgacggtacgacgacgattgccaataaccttaccagcacggttcaggtgtttactgactcggagtaccagctcccgtacgtcctcggctcggcgcatcaaggatgcctcccgccgtttccagcggacgtcttcatggtcccacagtatggatacctcaccctgaacaacgggagtcaggcggtaggacgctcttccttttactgcctggagtactttccttctcagatgctgcgtactggaaacaactttcagttcagctacacttttgaagacgtgcctttccacagcagctacgctcacagccagagtttggatcggctgatgaatcctctgatcgaccagtacctgtattatctaaacagaacacaaacagctagtggaactcagcagtctcggctactgtttagccaagctggacccacaagcatgtctcttcaagctaaaaactggctgcctggaccgtgttatcgccagcagcgtttgtcaaagcaggcaaacgacaacaacaacagcaactttccctggactggagctaccaagtactacctcaatggcagagactctttggtgaacccgggcccggccatggccagccacaaggacgatgaagaaaagtttttccccatgcatggaaccctaatatttggtaaagaaggaacaaatgctaccaacgcggaattggaaaatgtcatgattacagatgaagaggaaatcaggaccaccaatcccgtggctacagagcagtacggatatgtgtcaaataatttgcaaaactcaaatactgctgcaagtactgaaactgtgaatcaccaaggagcattacctggtatggtgtggcaggatcgagacgtgtacctgcagggacccatttgggccaagattcctcacaccgatggacactttcatccttctccactgatgggaggttttggactcaaacacccgcctcctcagattatgatcaaaaacactcccgttccagccaatcctcccacaaacttcagttctgccaagtttgcttccttcatcacacagtattccacgggacaggtcagcgtggagatcgagtgggagctgcagaaggagaacagcaaacgctggaatcccgaaattcagtacacttccaactacaacaaatctgttaatgtggactttactgtggacactaatggtgtgtattcagagcctcgccccattggcaccagatacctgactcgtaatctgtaattgcttgttaatcaataaaccgtttaattcgtttcagttgaactttggtctctgcgaagggcgaattcgcggccgctaaatcaatcg

SEQ ID NO: 304 - protein, 734 aa, Artificial Sequence
  source: /note="Description of Artificial Sequence: Synthetic polypeptide"
MAADGYLPDWLEDTLSEGIRQWWKLKPGPPPPKPAERHKDDSRGLVLPGYKYLGPFNGLDKGEPVNEADAAALEHDKAYDRQLDSGDNPYLKYNHADAEFQERLKEDTSFGGNLGRAVFQAKKRVLEPLGLVEEPVKTAPGKKRPVEHSPAEPDSSSGTGKAGQQPARKRLNFGQTGDADSVPDPQPLGQPPAAPTSLGSTTMATGSGAPMADNNEGADGVGNSSGNWHCDSQWLGDRVITTSTRTWALPTYNNHLYKQISSQSGASNDNHYFGYSTPWGYFDFNRFHCRFSPRDWQRLINNNWGFRPKRLNFKLFNIQVKEVTQNDGTTTIANNLTSTVQVFTDSEYQLPYVLGSAHQGCLPPFPADVFMVPQYGYLTLNNGSQAVGRSSFYCLEYFPSQMLRTGNNFQFSYTFEDVPFHSSYAHSQGLDRLMNPLIDQYLYYLNRTQTASGTQQSRLLFSQAGPTSMSLQAKNWLPGPCYRQQRLSKQANDNNNSNFPWTGATKYHLNGGDSLVNPGPAMASHKDDEEKFFPMHGTLIFGKEGTNATNAELENVMITDEEEIRTTNPVATEQYGYVSNNLQNSNTAASTETVNHQGALPGMVWQDRDVYLRGPIWAKIPHADGHFHPSPLMGGFGLKHPPPQIMIKNTPVPANPPTNFSSAKFASFITQYSTGQVSVEIEWELQKENSKRWNPEIQYTSNYNKSVNVDFTVDTNGVYSEPRPIGTRYLTRNL

SEQ ID NO: 305 - DNA, 3157 bp, Artificial Sequence
  source: /note="Description of Artificial Sequence: Synthetic polynucleotide"
ctcactaagggactagtcctgcaggtttaaacgaattcgcccttgctgcgtcaactggaccaatgagaactttcccttcaacgactgtgtcgacaagatggtgatttggtgggaggaggggaagatgaccgccaaggtcgtggagtcggccaaagccactctcggaggaagcaaggtgcgcgtggaccagaaacgcaagtcctcggcccagatagatccgactcccgtgatcgtcacctccaacaccaacatgtgcgccgtgattgacgggaactcaacgaccttcgaacaccagcagccgttgcaagaccgaatgttcaaatttgaactcacccgccgtctggatcatgacttcgggaaggtcaccaagcaggaagtcaaagactttttccggtgggcaaaggatcacgtggttgaggtggagcatgaattctacgtcaaaaagggtggagccaagaaaagacccgcccctagtgacgcagatataagtgagcccaaacgggtgcgcgagtcagttgcgcagccatcgacgtcagacgcggaagcttcgatcaactacgcggacaggtaccaaaacaaatgttctcgtcacgtgggcatgaatctgatgctgtttccctgcagacaatgcgagagaatgaatcaaaattcaaatatctgcttcactcacggacagaaagactgtttagagtgctttcccgtgtcagaatctcaacctgtttctgtcgtcaaaaaggcgtatcagaaactgtgctacattcatcatatcatgggaaaggtgccagacgcttgcactgcctgcgatctggtcaatgtggatttggatgactgcatctctgaacaataaatgatttaaatcaggtatggctgccgatggttatcttccagattggctcgaggacactctctctgaaggaataagacagtggtggaagctcaaacctggcccaccaccaccaaagcccgcagagcggcataaggacgacagcaggggtcttgtgcttcctgggtacaagtacctcggacccttcaacggactcgacaagggagagccggtcaacgaggcagacgccgcggctctcgagcacgacaaggcctacgaccggcagctcgacagcggagacaacccgtacctcaagtacaaccacgccgacgcggagtttcaggagcgtcttaaagaagatacgtcttttgggggcaacctcggacgagcagtcttccaggcgaaaaagagggttcttgaacctctgggcctggttgaggaacctgttaagacggctccgggaaaaaagaggccggtagagcactctcctgcggagccagactcctcctcgggaaccggaaaagcgggccagcagcctgcaagaaaaagactgaatttcggtcagactggagacgcagactccgtacctgacccccagcctctcggacagccaccagcagcccccacaagtttgggatctactacaatggctacaggcagtggcgcaccaatggcagacaataacgagggtgccgatggagtgggtaattcctcaggaaattggcattgcgattcccaatggctgggcgacagagtcatcaccaccagcacccgaacctgggccctgcccacctacaacaaccacctttacaagcaaatctccagccaatcaggagcctcaaacgacaaccactactttggctacagcaccccctgggggtattttgacttcaacagattccactgccgcttttcaccacgtgactggcaaagactcatcaacaacaactggggattccgacccaagagactcaacttcaagctctttaacattcaagtcaaagaggtcacgcagaatgacggtacgacgacgattgccaataaccttaccagcacggttcaggtgtttactgactcggagtaccagctcccgtacgtcctcggctcggcgcatcaaggatgcctcccgccgtttccagcggacgtcttcatggtcccacagtatggatacctcaccctgaacaacgggagtcaggcggtaggacgctcttccttttactgcctggagtactttccttctcagatgctgcgtactggaaacaactttcagttcagctacacttttgaagacgtgcctttccacagcagctacgctcacagccagggtttggatcggctgatgaatcctctgatcgaccagtacctgtattatctaaacagaacacaaacagctagtggaactcagcagtctcggctactgtttagccaagctggacccacaagcatgtctcttcaagctaaaaactggctgcctggaccgtgttatcgccagcagcgtttgtcaaagcaggcaaacgacaacaacaacagcaactttccctggactggagctaccaagtaccacctcaatggcggagactctttggtgaacccgggcccggccatggccagccacaaggacgatgaagaaaagtttttccccatgcatggaaccctaatatttggtaaagaaggaacaaatgctaccaacgcggaattggaaaatgtcatgattacagatgaagaggaaatcaggaccaccaatcccgtggctacagagcagtacggatatgtgtcaaataatttgcaaaactcaaatactgctgcaagtactgaaactgtgaatcaccaaggagcattacctggtatggtgtggcaggatcgagacgtgtacctgcggggacccatttgggccaagattcctcacgccgatggacactttcatccttctccactgatgggaggttttggactcaaacacccgcctcctcagattatgatcaaaaacactcccgttccagccaatcctcccacaaacttcagttctgccaagtttgcttccttcatcacacagtattccacgggacaggtcagcgtggagatcgagtgggagctgcagaaggagaacagcaaacgctggaatcccgaaattcagtacacttccaactacaacaaatctgttaatgtggactttactgtggacactaatggtgtgtattcagagcctcgccccattggcaccagatacctgactcgtaatctgtaattgcttgttaatcaataaaccgtttaattcgtttcagttgaactttggtctctgcgaagggcgaattcgcggccgctaaattcaattcg

SEQ ID NO: 306 - protein, 734 aa, Artificial Sequence
  source: /note="Description of Artificial Sequence: Synthetic polypeptide"
MAADGYLPDWLEDTLSEGIRQWWKLKPGPPPPKPAERHKDDSRGLVLPGYKYLGPFNGLDKGEPVNEADAAALEHDKAYDRQLDSGDNPYLKYNHADAEFQERLKEDTSFGGNLGRAVFQAKKRVLEPLGLVEEPVKTAPGKKRPVEHSPAEPDSSSGTGKAGQQPARKRLNFGQTGDADSVPDPQPLGQPPAAPTSLGSTTMATGSGAPMADNNEGADGVGNSSGNWHCDSQWLGDRVITTSTRTWALPTYNNHLYKQISSQSGASNDNHYFGYSTPWGYFDFNRFHCHFSPRDWQRLINNNWGFRPKRLNFKLFNIQVKEVTQNDGTTTIANNLTSTVQVFTDSEYQLPYVLGSAHQGCLPPFPADVFMVPQYGYLTLNNGSQAVGRSSFYCLECFPSQMLRTGNNFQFSYTFEDVPFHSSYAHSQSLDRLMNPLIDQYLYYLNRTQTASGTQQSRLLFSQAGPTSMSLQAKNWLPGPCYRQQRLSKQANDNNNSNFPWTGATKYHLNGRDSLVNPGPAMASHKDDEEKFFPMHGTLIFGKEGTNATNAELENVMITDEEEIRTTNPVATEQYGYVSNNLQNSNTAASTETVNHQGALPGMVWQDRDVYLQGPIWAKIPHTDGHFHPSPLMGGFGLKHPPPQIMIKNTPVPANPPTNFSSAKFASFITQYSTGQVSVEIEWELQKENSKRWNPEIQYTSNYNKSVNVDFTVDTNGVYSEPRPIGTRYLTRNL

SEQ ID NO: 307 - DNA, 2208 bp, Artificial Sequence
  source: /note="Description of Artificial Sequence: Synthetic polynucleotide"
atggctgccgatggttatcttccagattggctcgaggacactctctctgaaggaataagacagtggtggaagctcaaacctggcccaccaccaccaaagcccgcagagcggcataaggacgacagcaggggtcttgtgcttcctggatacaagtacctcggacccttcaacggactcgacaagggagagccggtcaacgaggcagacgccgcggccctcgagcacgacaaggcctacgaccggcagctcgacagcggagacaacccgtacctcaagtacaaccacgccgacgcggagtttcaggagcgccttaaagaagatacgtcttttgggggcaacctcggacgagcagtcttccaggcgaaaaagagggttcttgaacctctgggcctggttgaggaacctgttaagacggctccgggaaaaaagaggccggtagagcactctcctgtggagccagactcctcctcgggaaccggaaaagcgggcaaccagcctgcaagaaaaagattgaatttcggtcagactggagacgcagactccgtacctgacccccagcctctcggacagccaccagcatccccctctggtctgggaactaatacgatggctacaggcagtggcgcaccaatggcagacaataacgagggcgccgacggagtgggtaattcctcgggaaattggcattgcgattccacatggatgggcgacagagtcgtcaccaccagcacccgcacctgggccctgcccacctacaacaaccacctctacaagcagatttccagccaatcaggagccagcaacgacaaccactactttggctacagcaccccttgggggtattttgacttcaacagattccactgccacttttcgccacgcgactggcagagactcatcaacaacaactggggattccggcccaaaagactcaacttcaagctgtttaacattcaagtcaaggaggtcacgcagaatgacggtacgacgacgattgccaataaccttaccagcacggttcaggtgtttactgacttggagtaccagctcccgtacgtcctcggctcggcgcatcaaggatgcctcccgccgttcccagcagacgtcttcatggtgccacagtatggatacctcaccctgaacaacgggagtcaggcggtaggacgctcttccttttactgcctggagtactttccttctcagatgcttcgcaccggaaacaactttaccttcagctacacttttgaagacgttcctttccacagcagctacgctcacagtcaaagtctggaccgtctcatgaatcctctcatcgaccagtacctgtattacttgagcagaacaaacactccaagcggaaccactacgcagtccaggcttcagttttctcaggccggagcgagtgacattcgggaccagtctaggaactggcttcctggaccctgttaccgccagcagcgagtatcaaagacagctgcggataacaacaacagtgaatactcgtggactggagctaccaagtaccacctcaatggcagagactctctggtgaatccgggcccggccatggccagccacaaggacgatgaagaaaagttttttcctcaaagcggggttctcatctttgggaagcaaggctcagagaaaacaaatgtggacattgaaaaggtcatgattacagacgaagaggaaatcaggaccaccaatcccgtggctacggagcagtatggttctgtatctaccaacctccagagcggcaacacacaagcagctacctcagatgtcaacacacaaggcgttcttccaggcatggtctggcaggacagagacgtgtacctgcaggggcccatctgggcaaaaattccacacacggacggacattttcacccctctcccctcatgggcggatttggacttaaacaccctcctccacagattctcattaagaataccccggtacctgcgaatccttcgaccaccttcagcgcggcaaagtttgcttccttcatcacacagtattccacggggcaggtcagcgtggagatcgagtgggagctgcagaaggagaacagcaaacgctggaatcccgaaattcagtacacttccaactacaacaaatctgttaatgtggactttactgtggacactaatggggtgtattcagagcctcgccctattggcaccagatacctgactcgtaatctgtaa

SEQ ID NO: 308 - DNA, 3159 bp, Artificial Sequence
  source: /note="Description of Artificial Sequence: Synthetic polynucleotide"
gattgatttagcggccgcgaattcgcccttgctgcgtcaactggaccaatgagaactttcccttcaacgattgcgtcgacaagatggtgatctggtgggaggagggaaagatgaccgccaaggtcgtggagtcggccaaagccattctcggaggaagcaaggtgcgtgtggaccaaaagtgcaagtcttcggcccagatcgacccgactcccgtgatcgtcacctccaacaccaacatgtgcgccgtgattgatggaaactcaacgaccttcgagcaccagcagccgttgcaagaccggatgttcaaatttgaacttacccgccgtctggatcatgactttggaaaggtcaccaagcaggaagtgaaagactttttccggtgggcaaaggatcacgtggttgaggtggagcatgagttctacgtcaaaaagggtggagccaaaaaaagacccgcccccagtgacgcagatataagtgagcccaaacgggcgcgcgagtcagttgcgcagccatcgacgtcagacgcggaagcttcgatcaactacgcggacaggtaccaaaacaaatgttctcgtcacgtgggcatgaatctgatgctgtttccctgcagacaatgcgagagaatgaatcagaattcaaatatctgcttcactcacggacagaaagactgtccatagtgctttcccgtgtcagaatctcaacccgtttctgtcgtcaaaaaggcgtatcagaaactgtgctacattcatcacatcatgggaaaggtgccagacgcttgcactgcttgcgacctggtcaatgtggatttggatgactgcatctctgaacaataaatgatttaaatcaggtatggctgccgatggttatcttccagattggctcgaggacactctctctgaaggaataagacagtggtggaagctcaaacctggcccaccaccaccaaagcccgcagagcggcataaggacgacagcaggggtcttgtgcttcctggatacaagtacctcggacccttcaacggactcgacaagggagagccggtcaacgaggcagacgccgcggccctcgagcacgacaaggcctacgaccggcagctcgacagcggagacaacccgtacctcaagtacaaccacgccgacgcggagtttcaggagcgccttaaagaagatacgtcttttgggggcaacctcggacgagcagtcttccaggcgaaaaagagggttcttgaacctctgggcctggttgaggaacctgttaagacggctccgggaaaaaagaggccggtagagcactctcctgtggagccagactcctcctcgggaaccggaaaagcgggcaaccagcctgcaagaaaaagattgaatttcggtcagactggagacgcagactccgtacctgacccccagcctctcggacagccaccagcatccccctctggtctgggaactaatacgatggctacaggcagtggcgcaccaatggcagacaataacgagggcgccgacggagtgggtaattcctcgggaaattggcattgcgattccacatggatgggcgacagagtcgtcaccaccagcacccgcacctgggccctgcccacctacaacaaccacctctacaagcagatttccagccaatcaggagccagcaacgacaaccactactttggctacagcaccccttgggggtattttgacttcaacagattccactgccacttttcgccacgcgactggcagagactcatcaacaacaactggggattccggcccaaaagactcaacttcaagctgtttaacattcaagtcaaggaggtcacgcagaatgacggtacgacgacgattgccaataaccttaccagcacggttcaggtgtttactgacttggagtaccagctcccgtacgtcctcggctcggcgcatcaaggatgcctcccgccgttcccagcagacgtcttcatggtgccacagtatggatacctcaccctgaacaacgggagtcaggcggtaggacgctcttccttttactgcctggagtactttccttctcagatgcttcgcaccggaaacaactttaccttcagctacacttttgaagacgttcctttccacagcagctacgctcacagtcaaagtctggaccgtctcatgaatcctctcatcgaccagtacctgtattacttgagcagaacaaacactccaagcggaaccactacgcagtccaggcttcagttttctcaggccggagcgagtgacattcgggaccagtctaggaactggcttcctggaccctgttaccgccagcagcgagtatcaaagacagctgcggataacaacaacagtgaatactcgtggactggagctaccaagtaccacctcaatggcagagactctctggtgaatccgggcccggccatggccagccacaaggacgatgaagaaaagttttttcctcaaagcggggttctcatctttgggaagcaaggctcagagaaaacaaatgtggacattgaaaaggtcatgattacagacgaagaggaaatcaggaccaccaatcccgtggctacggagcagtatggttctgtatctaccaacctccagagcggcaacacacaagcagctacctcagatgtcaacacacaaggcgttcttccaggcatggtctggcaggacagagacgtgtacctgcaggggcccatctgggcaaaaattccacacacggacggacattttcacccctctcccctcatgggcggatttggacttaaacaccctcctccacagattctcattaagaataccccggtacctgcgaatccttcgaccaccttcagcgcggcaaagtttgcttccttcatcacacagtattccacggggcaggtcagcgtggagatcgagtgggagctgcagaaggagaacagcaaacgctggaatcccgaaattcagtacacttccaactacaacaaatctgttaatgtggactttactgtggacactaatggggtgtattcagagcctcgccctattggcaccagatacctgactcgtaatctgtaattgcttgttaatcaataaaccgtttaattcgtttcagttgaactttggtctctgcgaagggcgaattcgtttaaacctgcaggactagtccctttagtgagg

SEQ ID NO: 309 - protein, 735 aa, Artificial Sequence
  source: /note="Description of Artificial Sequence: Synthetic polypeptide"
MAADGYLPDWLEDTLSEGIRQWWKLKPGPPPPKPAERHKDDSRGLVLPGYKYLGPFNGLDKGEPVNEADAAALEHDKAYDRQLDSGDNPYLKYNHADAEFQERLKEDTSFGGNLGRAVFQAKKRVLEPLGLVEEPVKTAPGKKRPVEHSPVEPDSSSGTGKAGNQPARKRLNFGQTGDADSVPDPQPLGQPPASPSGLGTNTMATGSGAPMADNNEGADGVGNSSGNWHCDSTWMGDRVVTTSTRTWALPTYNNHLYKQISSQSGASNDNHYFGYSTPWGYFDFNRFHCHFSPRDWQRLINNNWGFRPKRLNFKLFNIQVKEVTQNDGTTTIANNLTSTVQVFTDLEYQLPYVLGSAHQGCLPPFPADVFMVPQYGYLTLNNGSQAVGRSSFYCLEYFPSQMLRTGNNFTFSYTFEDVPFHSSYAHSQSLDRLMNPLIDQYLYYLSRTNTPSGTTTQSRLQFSQAGASDIRDQSRNWLPGPCYRQQRVSKTAADNNNSEYSWTGATKYHLNGRDSLVNPGPAMASHKDDEEKFFPQSGVLIFGKQGSEKTNVDIEKVMITDEEEIRTTNPVATEQYGSVSTNLQSGNTQAATSDVNTQGVLPGMVWQDRDVYLQGPIWAKIPHTDGHFHPSPLMGGFGLKHPPPQILIKNTPVPANPSTTFSAAKFASFITQYSTGQVSVEIEWELQKENSKRWNPEIQYTSNYNKSVNVDFTVDTNGVYSEPRPIGTRYLTRNL

SEQ ID NO: 310 - DNA, 2205 bp, Artificial Sequence
  source: /note="Description of Artificial Sequence: Synthetic polynucleotide"
atggctgccgatggttatcttccagattggctcgaggacactctctctgaaggaataagacagtggtggaagctcaaacctggcccaccaccaaagcccgcagagcggcataaggacgacagcaggggtcttgtgcttcctggatacaagtacctcggacccttcaacggactcgacaagggagagccggtcaacgaggcagacgccgcggccctcgagcacgacaaggcctacgaccggcagctcgacagcggagacaacccgtacctcaagtacaaccacgccgacgcggagtttcaggagcgccttaaagaagatacgtcttttgggggcaacctcggacgagcagtcttccaggcgaaaaagagggttcttgaacctctgggcctggttgaggaacctgttaagacggctccgggaaaaaagaggcccgtagagcactctcctgtggagccagactcctcctcgggaaccggaaaagcgggcaaccagcctgcaagaaaaagattgaatttcggtcagactggagacgcagactccgtacctgacccccagcctctcggacagccaccagcagccccctctggtctgggaactaatacgatggctacaggcagtggcgcaccaatggcagacaataacgagggcgccgacggagtgggtaattcctcgggagattggcattgcgattccacatggatgggcgacagagtcatcaccaccagcacccgcacctgggccctgcccacctacaacaaccacctctacaagcagatttccagccaatcaggagccagcaatgacaaccactactttggctacagcaccccttgggggtattttgacttcaacagattccactgccacttttcgccacgcgactggcagagactcatcaacaacaactggggattccggcccaaaagactcaacctcaagctgtttaacattcaagtcaaggaggtcacgcagaatgacggtacgacgacgattgccaataaccttaccagcacggttcaggtgtttactgacttggagtaccagctcccgtacgtcctcggctcggcgcatcaaggatgcctcccgccgttcccagcagacgtcttcatggtgccacagtatggatacctcaccctgaacaacgggagtcaggcggtaggacgctcttccttttactgcctggagtactttccttctcagatgcttcgtaccggaaacaactttaccttcagctacacttttgaagacgttcctttccacagcagctacgctcacagtcaaagtctggaccgtctcatgaatcctctcatcgaccagtacctgtattacttgagcagaacaaacactccaagcggaaccactacgcagtccaggcttcagttttctcaggccggagcgagtgacattcgggaccagtctaggaactggcttcctggaccctgttaccgccagcagcgagtatcaaagacagctgcggataacaacaacggtgaatactcgtggactggagctaccaagtaccacctcaatggcagagactctctggtgaatccgggcccggccatggccagccacaaggacgatgaagaaaagttttttcctcaaagcggggttctcatctttgggaagcaaggctcagagaaaacaaatgtggacattgaaaaggtcatgattacagacgaagaggaaatcaggaccaccaatcccgtggctacggagcagtatggttctgtatctaccaacctccagagcggcaacacacgagcagctacctcagatgtcaacacacaaggcgttcttccaggcatggtctggcaggacagagacgtgtacctgcaggggcccatctgggcaaaaattccacacacggacggacattttcacccctctcccctcatgggcggatttggacttaaacaccctcctccacagattctcattaagaataccccggtacctgcgaatccttcgaccaccttcagcgcggcaaagtttgcttccttcatcacacagtattccacggggcaggtcagcgtggagatcgagtgggagctgcagaaggagaacagcaaacgctggaatcccgaaattcagtacacttccaactacaacaaatctgttaatgtggactttactgtggacactaatggggtgtattcagagcctcgccctattggcaccagatacctgactcgtaatctgtaa

SEQ ID NO: 311 - DNA, 3156 bp, Artificial Sequence
  source: /note="Description of Artificial Sequence: Synthetic polynucleotide"
cgattgaatttagcggccgcgaattcgcccttgctgcgtcaacggaccaatgagaactttcccttcaacgattgcgtcgacaagatggtgatctggtgggaggagggaaagatgaccgccaaggtcgtggagtcggccaaagccattctcggaggaagcaaggtgcgtgtggaccaaaagtgcaagtcttcggcccagatcgacccgactcccgtgatcgtcacctccaacaccaacatgtgcgccgtgattgatggaaactcaacgaccttcgagcaccagcagccgttgcaagaccggatgttcaaatttgaacttacccgccgtctggatcatgactttggaaaggtcaccaagcaggaagtgaaagactttttccggtgggcaaaggatcacgtggttgaggtggagcatgagttctacgtcaaaaagggtggagccaaaaaaagacccgcccccagtgacgcagatataagtgagcccaaacgggcgcgcgagtcagttgcgcagccatcgacgtcagacgcggaagcttcgatcaactacgcggacaggtaccaaaacaaatgttctcgtcacgtgggcatgaatctgatgctgtttccctgcagacaatgcgagcgaatgaatcagaattcaaatatctgcttcactcacggacagaaagactgtttagagtgctttcccgtgtcagaatctcaacccgtttctgtcgtcaaaaaggcgtatcagaaactgtgctacattcatcacatcatgggaaaggtgccagacgcttgcactgcttgcgacctggtcaatgtggatttggatgactgcatctctgaacaataaatgatttaaatcaggtatggctgccgatggttatcttccagattggctcgaggacactctctctgaaggaataagacagtggtggaagctcaaacctggcccaccaccaaagcccgcagagcggcataaggacgacagcaggggtcttgtgcttcctggatacaagtacctcggacccttcaacggactcgacaagggagagccggtcaacgaggcagacgccgcggccctcgagcacgacaaggcctacgaccggcagctcgacagcggagacaacccgtacctcaagtacaaccacgccgacgcggagtttcaggagcgccttaaagaagatacgtcttttgggggcaacctcggacgagcagtcttccaggcgaaaaagagggttcttgaacctctgggcctggttgaggaacctgttaagacggctccgggaaaaaagaggcccgtagagcactctcctgtggagccagactcctcctcgggaaccggaaaagcgggcaaccagcctgcaagaaaaagattgaatttcggtcagactggagacgcagactccgtacctgacccccagcctctcggacagccaccagcagccccctctggtctgggaactaatacgatggctacaggcagtggcgcaccaatggcagacaataacgagggcgccgacggagtgggtaattcctcgggagattggcattgcgattccacatggatgggcgacagagtcatcaccaccagcacccgcacctgggccctgcccacctacaacaaccacctctacaagcagatttccagccaatcaggagccagcaatgacaaccactactttggctacagcaccccttgggggtattttgacttcaacagattccactgccacttttcgccacgcgactggcagagactcatcaacaacaactggggattccggcccaaaagactcaacctcaagctgtttaacattcaagtcaaggaggtcacgcagaatgacggtacgacgacgattgccaataaccttaccagcacggttcaggtgtttactgacttggagtaccagctcccgtacgtcctcggctcggcgcatcaaggatgcctcccgccgttcccagcagacgtcttcatggtgccacagtatggatacctcaccctgaacaacgggagtcaggcggtaggacgctcttccttttactgcctggagtactttccttctcagatgcttcgtaccggaaacaactttaccttcagctacacttttgaagacgttcctttccacagcagctacgctcacagtcaaagtctggaccgtctcatgaatcctctcatcgaccagtacctgtattacttgagcagaacaaacactccaagcggaaccactacgcagtccaggcttcagttttctcaggccggagcgagtgacattcgggaccagtctaggaactggcttcctggaccctgttaccgccagcagcgagtatcaaagacagctgcggataacaacaacggtgaatactcgtggactggagctaccaagtaccacctcaatggcagagactctctggtgaatccgggcccggccatggccagccacaaggacgatgaagaaaagttttttcctcaaagcggggttctcatctttgggaagcaaggctcagagaaaacaaatgtggacattgaaaaggtcatgattacagacgaagaggaaatcaggaccaccaatcccgtggctacggagcagtatggttctgtatctaccaacctccagagcggcaacacacgagcagctacctcagatgtcaacacacaaggcgttcttccaggcatggtctggcaggacagagacgtgtacctgcaggggcccatctgggcaaaaattccacacacggacggacattttcacccctctcccctcatgggcggatttggacttaaacaccctcctccacagattctcattaagaataccccggtacctgcgaatccttcgaccaccttcagcgcggcaaagtttgcttccttcatcacacagtattccacggggcaggtcagcgtggagatcgagtgggagctgcagaaggagaacagcaaacgctggaatcccgaaattcagtacacttccaactacaacaaatctgttaatgtggactttactgtggacactaatggggtgtattcagagcctcgccctattggcaccagatacctgactcgtaatctgtaattgcttgttaatcaataaaccgtttaattcgtttcagttgaactttggtctctgcgaagggcgaattcgtttaaacctgcaggactagtccctttagtgag

SEQ ID NO: 312 - protein, 734 aa, Artificial Sequence
  source: /note="Description of Artificial Sequence: Synthetic polypeptide"
MAADGYLPDWLEDTLSEGIRQWWKLKPGPPPKPAERHKDDSRGLVLPGYKYLGPFNGLDKGEPVNEADAAALEHDKAYDRQLDSGDNPYLKYNHADAEFQERLKEDTSFGGNLGRAVFQAKKRVLEPLGLVEEPVKTAPGKKRPVEHSPVEPDSSSGTGKAGNQPARKRLNFGQTGDADSVPDPQPLGQPPAAPSGLGTNTMATGSGAPMADNNEGADGVGNSSGDWHCDSTWMGDRVITTSTRTWALPTYNNHLYKQISSQSGASNDNHYFGYSTPWGYFDFNRFHCHFSPRDWQRLINNNWGFRPKRLNLKLFNIQVKEVTQNDGTTTIANNLTSTVQVFTDLEYQLPYVLGSAHQGCLPPFPADVFMVPQYGYLTLNNGSQAVGRSSFYCLEYFPSQMLRTGNNFTFSYTFEDVPFHSSYAHSQSLDRLMNPLIDQYLYYLSRTNTPSGTTTQSRLQFSQAGASDIRDQSRNWLPGPCYRQQRVSKTAADNNNGEYSWTGATKYHLNGRDSLVNPGPAMASHKDDEEKFFPQSGVLIFGKQGSEKTNVDIEKVMITDEEEIRTTNPVATEQYGSVSTNLQSGNTRAATSDVNTQGVLPGMVWQDRDVYLQGPIWAKIPHTDGHFHPSPLMGGFGLKHPPPQILIKNTPVPANPSTTFSAAKFASFITQYSTGQVSVEIEWELQKENSKRWNPEIQYTSNYNKSVNVDFTVDTNGVYSEPRPIGTRYLTRNL

SEQ ID NO: 313 - DNA, 2208 bp, Artificial Sequence
  source: /note="Description of Artificial Sequence: Synthetic polynucleotide"
atggctgccgatggttatcttccagattggctcgaggacactctctctgaaggaataagacagtggtggaagctcaaacctggcccaccaccaccaaagcccgcagagcggcataaggacgacagcaggggtcttgtgcttcctgggtacaagtacctcggacccttcaacggactcgacaagggagagccggtcaacgaggcagacgccgcggccctcgagcacgacaaggcctacgaccggcagctcgacagcggagacaacccgtacctcaagtacgaccacgccgacgcggagtttcaggagcgccttaaagaagatacgtcttttgggggcaacctcggacgagcagtcttccaggcaaaaaagagggttcttgaacctctgggcctggttgaggagcctgttaagacggctccgggaaaaaagaggccggtagagcactctcctgtggagccagactcctcctcgggaaccggaaaagcgggcaaccagcctgcaagaaagagattgaatttcggtcagactggagacgcagactccgtacctgacccccagcctctcggacagccaccagcagccccctctggtctgggaactaatacgatggctacaggcagtggcgcaccaatggcagacaataacgatggcgccgacggagtgggtaattcctcgggaaattggcattgcgattccacatggatgggcgacagagtcatcaccaccagcacccgaacctgggctctgcccacctacaacaaccatctgtacaagcagatttccagccaatcaggagccagcaacgacaaccactactttggctacagcaccccttgggggtattttgacttcaacagattccactgccacttttcaccacgtgactggcaaagactcatcaacaacaactggggattccggcccaagagactcaacttcaagctctttaacattcaagtcagagaggtcacgcagaatgatggtacgacgacgattgccaataaccttaccagcacggttcaggtgtttactgactcggagtaccagctcccgtacgtcctcggctcggcgcatcaaggatgcctcccgccgttcccagcagacgtcttcatggtgccacagtatggatacctcaccctgaacaacgggagtcaggcagtaggacgctcttcattttactgcctggagtacttcccttctcagatgctgcgtaccggaaacaactttaccttcagctacacctttgaggatgttcctttccacagcagctacgctcacagccagagtttggaccgtctcatgaatcctctcatcgaccagtacctgtattacttgagcagaacaaacactccaagcggaaccaccacgcagtccaggcttcagttttctcaggccggagcgagtgacattcgggatcagtctaggaactggcttcctggaccctgttaccgccagcagcgagtatcaaagacatctgcggacaacaacaacagtgaatactcgtggattggagctaccaagtaccacctcaatggcagagactctctggtgaatccgggcccggcaatggccagccacaaggacgatgaagaaaagttttttcctcagagcggggttctcatctttggaaaacaaggatcagagaaaacaaatgtggacattgaaaaggtcatgattacagacgaagaggaaatcagaaccaccaatcccgtggccacggagcagtatggttctgtatctaccaacctccagagcggcaacacacaagcatctactgcagatgtcaacacacaaggcgttcttccaggcatggtctggcaggacagagacgtgtacctgcaggggcctatctgggcaaagattccgcacacggacggacattttcacccctctcccctcatgggcggattcggacttaaacaccctcctccacagattctcatcaaaaacaccccggtacctgcgaatccttcgaccaccttcagtgcggcaaagtttgcttccttcatcacacagtattccacggggcgggtcagcgtggagatcgagtgggagctacagaaggagaacagcaaacgctggaatcccgagatccagtacacttccaactacaacaaatctgttaatgtggactttactgtggacactaatggtgtgtattcagagcctcgccccattggcaccagatacctgactcgtaatctgtaa

SEQ ID NO: 314 - protein, 735 aa, Artificial Sequence
  source: /note="Description of Artificial Sequence: Synthetic polypeptide"
MAADGYLPDWLEDTLSEGIRQWWKLKPGPPPPKPAERHKDDSRGLVLPGYKYLGPFNGLDKGEPVNEADAAALEHDKAYDRQLDSGDNPYLKYDHADAEFQERLKEDTSFGGNLGRAVFQAKKRVLEPLGLVEEPVKTAPGKKRPVEHSPVEPDSSSGTGKAGNQPARKRLNFGQTGDADSVPDPQPLGQPPAAPSGLGTNTMATGSGAPMADNNDGADGVGNSSGNWHCDSTWMGDRVITTSTRTWALPTYNNHLYKQISSQSGASNDNHYFGYSTPWGYFDFNRFHCHFSPRDWQRLINNNWGFRPKRLNFKLFNIQVREVTQNDGTTTIANNLTSTVQVFTDSEYQLPYVLGSAHQGCLPPFPADVFMVPQYGYLTLNNGSQAVGRSSFYCLEYFPSQMLRTGNNFTFSYTFEDVPFHSSYAHSQSLDRLMNPLIDQYLYYLSRTNTPSGTTTQSRLQFSQAGASDIRDQSRNWLPGPCYRQQRVSKTSADNNNSEYSWIGATKYHLNGRDSLVNPGPAMASHKDDEEKFFPQSGVLIFGKQGSEKTNVDIEKVMITDEEEIRTTNPVATEQYGSVSTNLQSGNTQASTADVNTQGVLPGMVWQDRDVYLQGPIWAKIPHTDGHFHPSPLMGGFGLKHPPPQILIKNTPVPANPSTTFSAAKFASFITQYSTGRVSVEIEWELQKENSKRWNPEIQYTSNYNKSVNVDFTVDTNGVYSEPRPIGTRYLTRNL

SEQ ID NO: 315 - DNA, 2217 bp, Artificial Sequence
  source: /note="Description of Artificial Sequence: Synthetic polynucleotide"
atggctgccgatggttatcttccagattggctcgaggacaacctctctgagggcattcgcgagtggtgggacttgaaacctggagccccgaaacccaaagccaaccagcaaaagcaggacgacggccggggtctggtgcttcctggctacaagtacctcggacccttcaacggactcgacaagggggagcccgtcaacgcggcggacgcagcggccctcgagcacgacaaggcctacgaccagcagctcaaagcgggtgacaatccgtacctgcggtataaccacgccgacgccgagtttcaggagcgtctgcaagaagatacgtcttttgggggcaacctcgggcgagcagtcttccaggccaagaagcgggttctcgaacctctcggtctggttgaggaaggcgctaagacggctcctggaaagaagagaccggtagagccatcaccccagcgttctccagactcctctacgggcatcggcaagacaggccagcagcccgcgaaaaagagactcaactttgggcagactggcgactcagagtcagtgcccgaccctcaaccaatcggagaaccccccgcaggcccctctggtctgggatctggtacaatggctgcaggcggtggcgctccaatggcagacaataacgaaggcgccgacggagtgggtagttcctcaggaaattggcattgcgattccgcatggctgggcgacagagtcatcaccaccagcacccgaccctgggccctccccacctacaacaaccacctctacaagcaaatctccaacgggacatcgggaggaagcaccaacgacaacacctacttcggctacagcaccccctgggggtattttgactttaacagattccactgccacttctcaccacgtgactggcagcgactcatcaacaacaactggggattccggcccaagagactcaacttcaagctcttcaacatccaggtcaaggaggtcacgcagaatgaaggcaccaagaccatcgccaataaccttaccagcacgattcaggtctttacggactcggaataccagctcccgtacgtcctcggctctgcgcaccagggctgcccgcctccgttcccggcggacgtcttcatgattcctcagtacgggtacctgactctgaacaacggcagtcaggccgtgggccgttcctccttctactgcctggagtactttccttctcaaatgcggagaacgggcaacaactttgagttcagctaccagtttgaggacgtgccttttcacagcagctacgcgcatagccaaagcctggaccggctgatgaaccccctcatcgaccagtacctgtactacctgtctcggactcagtccacgggaggtaccgcaggaactcagcagttgctattttctcaggccgggcctaataacatgtcggctcaggccaaaaactggctacccgggccctgctaccggcagcaacgcgtctccacgacactgtcgcaaaataacaacagcaactttgcttggaccggtgccaccaagtatcatctgaatggcagagactctctggtaaatcccggtgtcgctatggcaacgcacaaggacgacgaagagcgattttttccatccagcggagtcttgatgtttgggaaacagggagctggaaaagacaacgtggactatagcagcgttatgctaaccagtgaggaagaaatcaaaaccaccaacccagtggccacagaacagtacggcgtggtggccgataacctgcaacagcaaaacgccgctcctattgtaggggccgtcaacagtcaaggagccttacctggcatggtctggcagaaccgggacgtgtacctgcagggtcctatctgggccaagattcctcacacggacggcaactttcatccttcgccgctgatgggaggctttggactgaaacacccgcctcctcagatcctgattaagaatacacctgttcccgcggatcctccaactaccttcagtcaagccaagctggcgtcgttcatcacgcagtacagcaccggacaggtcagcgtggaaattgaatgggagctgcagaaagagaacagcaagcgctggaacccagagattcagtatacttccaactactacaaatctacaaatgtggactttgctgtcaatactgagggtacttattcagagcctcgccccattggcacccgttacctcacccgtaacctgtaa

SEQ ID NO: 316 - protein, 738 aa, Artificial Sequence
  source: /note="Description of Artificial Sequence: Synthetic polypeptide"
MAADGYLPDWLEDNLSEGIREWWDLKPGAPKPKANQQKQDDGRGLVLPGYKYLGPFNGLDKGEPVNAADAAALEHDKAYDQQLKAGDNPYLRYNHADAEFQERLQEDTSFGGNLGRAVFQAKKRVLEPLGLVEEGAKTAPGKKRPVEPSPQRSPDSSTGIGKTGQQPAKKRLNFGQTGDSESVPDPQPIGEPPAGPSGLGSGTMAAGGGAPMADNNEGADGVGSSSGNWHCDSAWLGDRVITTSTRPWALPTYNNHLYKQISNGTSGGSTNDNTYFGYSTPWGYFDFNRFHCHFSPRDWQRLINNNWGFRPKRLNFKLFNIQVKEVTQNEGTKTIANNLTSTIQVFTDSEYQLPYVLGSAHQGCPPPFPADVFMIPQYGYLTLNNGSQAVGRSSFYCLEYFPSQMRRTGNNFEFSYQFEDVPFHSSYAHSQSLDRLMNPLIDQYLYYLSRTQSTGGTAGTQQLLFSQAGPNNMSAQAKNWLPGPCYRQQRVSTTLSQNNNSNFAWTGATKYHLNGRDSLVNPGVAMATHKDDEERFFPSSGVLMFGKQGAGKDNVDYSSVMLTSEEEIKTTNPVATEQYGVVADNLQQQNAAPIVGAVNSQGALPGMVWQNRDVYLQGPIWAKIPHTDGNFHPSPLMGGFGLKHPPPQILIKNTPVPADPPTTFSQAKLASFITQYSTGQVSVEIEWELQKENSKRWNPEIQYTSNYYKSTNVDFAVNTEGTYSEPRPIGTRYLTRNL

SEQ ID NO: 317 - protein, 735 aa, Artificial Sequence
  source: /note="Description of Artificial Sequence: Synthetic polypeptide"
MAADGYLPDWLEDTLSEGIRQWWKLKPGPPPPKPAERHKDDSRGLVLPGYKYLGPFNGLDKGEPVNEADAAALEHDKAYDRQLDSGDNPYLKYNHADAEFQERLKEDTSFGGNLGRAVFQAKKRVLEPLGLVEEPVKTAPGKKRPVEHSPVEPDSSSGTGKAGQQPARKRLNFGQTGDADSVPDPQPLGQPPAAPSGLGSTTMATGSGAPMADNNEGADGVGNSSGNWHCDSQWLGDRVITTSTRTWALPTYNNHLYKQISSQSGASNDNHYFGYSTPWGYFDFNRFHCHFSPRDWQRLINNNWGFRPKRLNFKLFNIQVKEVTQNDGTTTIANNLTSTVQVFTDSEYQLPYVLGSAHQGCLPPFPADVFMVPQYGYLTLNNGSQAVGRSSFYCLEYFPSQMLRTGNNFQFSYTFEDVPFHSSYAHSQSLDRLMNPLVDQYLYYLNKTQTNSGTLQQSRLLFSQAGPTNMSLQAKNWLPGPCYRQQRLSKQANDNNNSNFPWTAATKYHLNGRDSLVNPGPAMASHKDDEEKFFPMHGTLIFGKQGTNANDADLENVMITDEEEIRTTNPVATEQYGTVSNNLQNSNTGPTTGTVNHQGALPGMVWQDRDVYLQGPIWAKIPHTDGHFHPSPLMGGFGLKHPPPQIMIKNTPVPANPPTNFSSAKFASFITQYSTGQVSVEIEWELQKENSKRWNPEIQYTSNYNKSVNVDFTVDTNGVYSEPRPIGTRYLTRNL

SEQ ID NO: 318 - DNA, 3158 bp, Artificial Sequence
  source: /note="Description of Artificial Sequence: Synthetic polynucleotide"
gattgaatttagcggccgcgaattcgcccttgctgcgtcaactggaccaatgagaactttcctttcaatgattgcgtcgacaagatggtgatctggtgggaggagggaaagatgaccgccaaggtcgtggagtcggccaaagccattctcggaggaagcaaggtgcgcgcggaccagaaatgcaagtcctcggcccagatagacccgactcccgtgattgtcacctccaacaccaacatgtgcgccgtgattgacgggaactcaacgaccttcgaacaccagcagccgttgcaagaccggatgttcaaatttgaactcacccgccgtctggatcatgactttgggaaggtcaccaagcaggaagtcaaagactttttccggtgggcaaaggatcacgtggttgaggtggagcatgaattctacgtcaaaaagggtggagctaagaaaagacccgcccccagtgacgcagatataagtgagcccaaacgggcgcgcgagtcagttgcgcagccatcgacgtcagacgcggaagcttcgatcaactacgcgggcaggtaccaaaacaaatgttctcgtcacgtgggcatgaatctgatgctgtttccctgcagacaatgcgagagaatgaatcagaattcaaatatctgcttcactcacggacagaaagactgtttagagtgctttcccgtgtcagaatctcaacccgtttctgtcgtcaaaaaggcgtatcagaaactttgctacattcatcatatcatgggaaaggtgccagacgcttgcactgcctgcgatctggtcaatgtggatttggatgactgcatctctgaacaataaatgatttaaatcaggtatggctgccgatggttatcttccagattggctcgaggacactctctctgaaggaataagacagtggtggaagctcaaacctggcccaccaccaccaaagcccgcagagcggcataaggacgacagcaggggtcttgtgcttcctgggtacaagtacctcggacccttcaacggactcgacaagggggagccggtcaacgaggcagacgccgcggccctcgagcacgacaaggcctacgaccggcagctcgacagcggagacaacccgtacctcaagtacaaccacgccgacgcggagtttcaggagcgccttaaagaagatacgtcttttgggggcaacctcggacgagcagtcttccaggcaaaaaagagggttcttgaacctctgggcctggttgaggaacctgttaaaacggctccgggaaaaaagaggccggtagagcactctcctgtggagccagactcctcctcgggaaccggaaaagcgggccagcagcctgcaagaaaaagattgaatttcggtcagactggagacgcagactccgtacctgacccccagcctctcggacagccaccagcagccccctctggtctgggatctactacaatggctacaggcagtggcgcaccaatggcagacaataacgagggtgccgatggagtgggtaattcctcgggaaattggcattgcgattcccaatggctgggcgacagagtcatcaccaccagcacccgcacctgggccctgcccacctacaacaaccacctctacaagcaaatctccagccaatcaggagcctcaaacgacaaccactactttggctacagcaccccctgggggtattttgacttcaacagattccactgccacttttcaccacgtgactggcaaagactcatcaacaacaactggggattccgacccaagagactcaacttcaagctctttaacattcaagtcaaagaggtcacgcagaatgacggtacgacgacgattgccaataaccttaccagcacggttcaggtgtttactgactcggagtaccagctcccgtacgtcctcggctcggcgcatcaaggatgcctcccgccgtttccagcggacgtcttcatggtcccacagtatggatacctcaccctgaacaacgggagtcaggcagtaggacgctcttcattttactgcctggagtactttccttctcagatgctgcgtaccggaaacaactttcaattcagctacacttttgaagacgtgcctttccacagcagctacgctcacagccagagtctggatcggctgatgaatcctctggtcgaccagtacctgtattatctgaacaagacacaaacaaatagtggaactcttcagcagtctcggctactgtttagccaagctggacccaccaacatgtctcttcaagctaaaaactggctgcctggaccttgctacagacagcagcgtctgtcaaagcaggcaaacgacaacaacaacagcaactttccctggactgcagctacaaagtatcatctaaatggccgggactcgttggttaatccaggaccagctatggccagtcacaaggatgacgaagaaaagtttttccccatgcatggaacccttatatttggtaaacaaggaacaaatgccaacgacgcggatttggaaaatgtcatgattacagatgaagaagaaatcaggaccaccaatcccgtggctacggagcagtacggaactgtatcaaataatttgcaaaactcaaacactggtccaactactggaactgtcaatcaccaaggagcgttacctggtatggtgtggcaggatcgagacgtgtacctgcagggacccatttgggccaagattcctcacaccgatggacactttcatccttctccactgatgggaggttttggactcaaacacccacctcctcaaatcatgatcaaaaacactcccgttccagccaatcctcccacaaacttcagttctgccaagtttgcttctttcatcacacagtattccacggggcaggtcagcgtggagatcgagtgggagctgcagaaggagaacagcaaacgctggaatcccgaaattcagtacacttccaactacaacaaatctgttaatgtggactttactgtggacactaatggtgtgtattcagagcctcgccccattggcaccagatacctgactcgtaatctgtaattgcttgttaatcaataaaccgtttaattcgtttcagttgaactttggtctctgcgaagggcgaattcgtttaaacctgcaggactagtccctttagtga

SEQ ID NO: 319 - protein, 735 aa, Artificial Sequence
  source: /note="Description of Artificial Sequence: Synthetic polypeptide"
MAADGYLPDWLEDTLSEGIRQWWKLKPGPPPPKPAERHKDDSRGLVLPGYKYLGPFNGLDKGEPVNEADAAALEHDKAYDRQLDSGDNPYLKYNHADAEFQERLKEDTSFGGNLGRAVFQAKKRVLEPLGLVEEPVKTAPGKKRPVEHPPVEPDSSSGTGKAGQQPARKRLNFGQTGDADSVPDPQPLGQPPAAPSGLGSTTMATGSGAPMADNNEGADGVGNSSGNWHCDSQWLGDRVITTSTRTWALPTYNNHLYKQISSQSGASNDNHYFGYSTPWGYFDFNRFHCHFSPRDWQRLINNNWGFRPKRLNFKLFNIQVKEVTQNDGTTTIANNLTSTVQVFTDSEYQLPYVLGSAHQGCLPPFPADVFMVPQYGYLTLNNGSQAVGRSSFYCLEYFPSQMLRTGNNFQFSYTFEDVPFHSSYAHSQSLDRLMNPLIDQYLYYLNKTQTNSGTLQQSRLLFSQAGPTNMSLQAKNRLPGPCYRQQRLSKQANDNNNSNFPWTAATKYHLNGRDSLVNPGPAMASHKDDEEKFFPMHGTLIFGKQGTNANDADLENVMITDEEEIRTTNPVATEQYGTVSNNLQNSNTGPTTGTVNHQGALPGMVWQDRDVYLQGPIWAKIPHTDGHFHPSPLVGGFGLKHPPPQIMIKNTPVPANPPTNFSSAKFASFITQYSTGQVSVEIEWELQKENSKRWNPEIQYTSNYNKSVNVDFTVDTNGVYSEPRPIGTRYLTRNL

SEQ ID NO: 320 - DNA, 3159 bp, Artificial Sequence
  source: /note="Description of Artificial Sequence: Synthetic polynucleotide"
gattgaatttagcggccgcgaattcgcccttgctgcgtcaactggaccaatgagaactttcctttcaatgattgcgtcgacaagatggtgatctggtgggaggagggaaagatgaccgccaaggtcgtggagtcggccaaagccattctcggaggaagcaaggtgcgcgtggaccagaaatgcaagtcctcggcccagatagacccgactcccgtgattgtcacctccaacaccgacatgtgcgccgtgattgacgggaactcaacgaccttcgaacaccagcagccgttgcaagaccggatgttcaaatttgaactcacccgccgtctggatcatgactttgggaaggtcaccaagcaggaagtcaaagactttttccggtgggcaaaggatcacgtggttgaggtggagcatgaattctacgtcaaaaagggtggagctaagaaaagacccgcccccagtgacgcagatataagtgagcccaaacgggcgcgcgagtcagttgcgcagccatcgacgtcagacgcggaagcttcgatcaactacgcggacaggtaccaaaacaaatgttctcgtcacgtgggcatgaatctgatgctgtttccctgcagacaatgcgagagaatgaatcagaattcaaatatctgcttcactcacggacagaaagactgtttagagtgctttcccgtgtcagaatctcaacccgtttctgtcgtcaaaaaggcgtatcagaaactttgctacattcatcatatcatgggaaaggtgccagacgcttgcactgcctgcgatctggtcaatgtggatttggatgactgcatctctgaacaataaatgatttaaatcaggtatggctgccgatggttatcttccagattggctcgaggacactctctctgaaggaataagacagtggtggaagctcaaacctggcccaccaccaccaaagcccgcagagcggcataaggacgacagcaggggtcttgtgcttcctgggtacaagtacctcggacccttcaacggactcgacaagggggagccggtcaacgaggcagacgccgcggccctcgagcacgacaaggcctacgaccggcagctcgacagcggagacaacccgtacctcaagtacaaccacgccgacgcggagtttcaggagcgccttaaagaagatacgtcttttgggggcaacctcggacgagcagtcttccaggcaaaaaagagggttcttgaacctctgggcctggttgaggaacctgttaaaacggctccgggaaaaaagaggccggtagagcaccctcctgtggagccagactcctcctcgggaaccggaaaagcgggccagcagcctgcaagaaaaagattgaatttcggtcagactggagacgcagactccgtacctgacccccagcctctcggacagccaccagcagccccctctggtctgggatctactacaatggctacaggcagtggcgcaccaatggcagacaataacgagggtgccgatggagtgggtaattcctcgggaaattggcattgcgattcccaatggctgggcgacagagtcatcaccaccagcacccgcacctgggccctgcccacctacaacaaccacctctacaagcaaatctccagccaatcaggagcctcaaacgacaaccactactttggctacagcaccccctgggggtattttgacttcaacagattccactgccacttttcaccacgtgactggcaaagactcatcaacaacaactggggattccgacccaagagactcaacttcaagctctttaacattcaagtcaaagaggtcacgcagaatgacggtacgacgacgattgccaataaccttaccagcacggttcaggtgtttactgactcggagtaccagctcccgtacgtcctcggctcggcgcatcaaggatgcctcccgccgtttccagcggacgtcttcatggtcccacagtatggatacctcaccctgaacaacgggagtcaggcagtaggacgctcttcattttactgcctggagtactttccttctcagatgctgcgtaccggaaacaactttcagttcagctacacttttgaagacgtgcctttccacagcagctacgctcacagccagagtctggatcggctgatgaatcctctgatcgaccagtacctgtattatctgaacaagacacaaacaaatagtggaactcttcagcagtctcggctactgtttagccaagctggacccaccaacatgtctcttcaagctaaaaaccggctgcctggaccttgctacagacagcagcgtctgtcaaagcaggcaaacgacaacaacaacagcaactttccctggaccgcagctacaaagtatcatctaaatggccgggactcgttggttaatccaggaccagctatggccagtcacaaggatgacgaagaaaagtttttccccatgcatggaacccttatatttggtaaacaaggaacaaatgccaacgacgcggatttggaaaatgtcatgattacagatgaagaagaaatcaggaccaccaatcccgtggctacggagcagtacggaactgtatcaaataatttgcaaaactcaaacactggtccaactactggaactgtcaatcaccaaggagcgttacctggtatggtgtggcaggatcgagacgtgtacctgcagggacccatttgggccaagattcctcacaccgatggacactttcatccttctccactggtgggaggttttggactcaaacacccacctcctcaaatcatgatcaaaaacactcccgttccagccaatcctcccacaaacttcagttctgccaagtttgcttctttcatcacacagtattccacggggcaggtcagcgtggagatcgagtgggagctgcagaaggagaacagcaaacgctggaatcccgaaattcagtacacttccaactacaacaaatctgttaatgtggactttactgtggacactaatggtgtgtattcagagcctcgccccattggcaccagatacctgactcgtaatctgtaattgcttgttaatcaataaaccgtttaattcgtttcagttgaactttggtctctgcgaagggcgaattcgtttaaacctgcaggactagtccctttagtgag

SEQ ID NO: 321 - DNA, 2208 bp, Artificial Sequence
  source: /note="Description of Artificial Sequence: Synthetic polynucleotide"
atggctgccgatggttatcttccagattggctcgaggacactctctctgaaggaataagacagtggtggaagctcaaacctggcccaccaccaccaaagcccgcagagcggcataaggacgacagcaggggtcttgtgcttcctgggtacaagtaccttggacccttcaacggactcgacaagggagagccggtcaacgaggcagacgccgcggccctcgagcacgacaaggcctacgaccggcagctcgacagcggagacaacccgtaccccaagtacaaccacgccgacgcggagttccaggagcgtcttaaagaagatacgtcttttgggggcaacctcggacgagcagtcttccaggcgaaaaagagggttcttgaacctctgggcctggttgaggaacctgttaagacggctccgggaaaaaagaggccggtagagcactctcctgcggagccagactcctcctcgggaaccggaaaagcgggccagcagcctgcaagaaagagattgaatttcggtcagactggagacgcagactccgtacctgacccccagcctctcggacagccaccagcagccccctctggtctgggaactaatacgatggctacaggcagtggcgcaccaatggcagacaataacgagggcgccgacggagtgggtaattcctcgggaaattggcattgcgattccacatggatgggcgacagagtcatcaccaccagcacccgcacctgggctctgcccacctacaacaaccacctctacaagcagatttccagccaatcaggagcctcaaacgacaaccactactttggctacagcaccccttgggggtattttgacttcaacagattccactgccacttttcgccacgtgactggcaaagactcatcaacaacaattggggattccggcccaaaagactcaacttcaagctctttaacattcaagtcaaggaggtcacgcagaatgacggtacgacgacgattgccaataaccttaccagcacggttcaggtgtttactgactcggagtaccagctcccgtacgtcctcggctcggcgcatcaaggatgcctcccgccgttcccagcagacgtcttcatggtgccacagtatggatacctcaccctgaacaacgggagtcaggcagtaggacgctcttcattttactgcctggagtactttccttctcagatgctgcgtaccggaaacaactttaccttcagctacacctttgaggacgttcctttccacagcagctacgcccacagccagagtttggaccgtctcatgaatcctctcatcgaccagtacctgtattacttgagcagaacaaacactccaagcggaaccaccacgcagtcaaggcttcagttttctcaggccggagcaagtgacattcgggaccagtctaggaactggcttcctggaccctgttaccgccagcagcgagtatcaaagacatctgcggataacaacaacagtgaatactcgtggactggagctaccaagtaccaccttaatggaagagactctctggtgaatccgggcccggccatggccagccacaaggacgatgaagaaaagttttttcctcagagcggggttctcatctttggaaaacaagactcgggaaaaactaatgtggacattgaaaaggtcatgattacagacgaagaggaaatcaggaccaccaatcccgtggctacggagcagtatggttctgtatctaccaacctccagagcggcaacacacaagcagctacctcagatgtcaacacacaaggcgttcttccaggcatggtgtggcaggacagagacgtgtacctgcaggggcccatctgggcaaagattccacacacggacggacattttcacccctctcccctcatgggcggattcggacttaaacaccctcccccgcagattctcatcaagaacaccccggtacctgcgaatccttcgactaccttcagtgcggcaaagtttgcttccttcattacacagtactccacggggcaggtcagcgtggagatcgagtgggagctgcagaaggagaacagcaaacgctggaatcccgagattcagtacacttccaactacaacaaatctgttaatgtggactttactgtggacactaatggtgtgtattcagagcctcgccccattggcaccaggtacctgactcgtaatctgtaa

SEQ ID NO: 322 - protein, 735 aa, Artificial Sequence
  source: /note="Description of Artificial Sequence: Synthetic polypeptide"
MAADGYLPDWLEDTLSEGIRQWWKLKPGPPPPKPAERHKDDSRGLVLPGYKYLGPFNGLDKGEPVNEADAAALEHDKAYDRQLDSGDNPYPKYNHADAEFQERLKEDTSFGGNLGRAVFQAKKRVLEPLGLVEEPVKTAPGKKRPVEHSPAEPDSSSGTGKAGQQPARKRLNFGQTGDADSVPDPQPLGQPPAAPSGLGTNTMATGSGAPMADNNEGADGVGNSSGNWHCDSTWMGDRVITTSTRTWALPTYNNHLYKQISSQSGASNDNHYFGYSTPWGYFDFNRFHCHFSPRDWQRLINNNWGFRPKRLNFKLFNIQVKEVTQNDGTTTIANNLTSTVQVFTDSEYQLPYVLGSAHQGCLPPFPADVFMVPQYGYLTLNNGSQAVGRSSFYCLEYFPSQMLRTGNNFTFSYTFEDVPFHSSYAHSQSLDRLMNPLIDQYLYYLSRTNTPSGTTTQSRLQFSQAGASDIRDQSRNWLPGPCYRQQRVSKTSADNNNSEYSWTGATKYHLNGRDSLVNPGPAMASHKDDEEKFFPQSGVLIFGKQDSGKTNVDIEKVMITDEEEIRTTNPVATEQYGSVSTNLQSGNTQAATSDVNTQGVLPGMVWQDRDVYLQGPIWAKIPHTDGHFHPSPLMGGFGLKHPPPQILIKNTPVPANPSTTFSAAKFASFITQYSTGQVSVEIEWELQKENSKRWNPEIQYTSNYNKSVNVDFTVDTNGVYSEPRPIGTRYLTRNL

SEQ ID NO: 323 - DNA, 2208 bp, Artificial Sequence
  source: /note="Description of Artificial Sequence: Synthetic polynucleotide"
atggctgccgatggttatcttccagattggctcgaggacactctctctgaaggaataagacagtggtggaagctcaaacctggcccaccaccaccaaagcccgcagagcggcataaggacgacagcaggggtcttgtgcttcctgggtacaagtaccttggacccttcaacggactcgacaagggagagccggtcaacgaggcagacgccgcggccctcgagcacgacaaggcctacgaccggcagctcgacggcggagacaacccgtacctcaagtacaaccacgccgacgcggagttccaggagcgtcttaaagaagatacgtcttttgggggcaacctcggacgagcagtcttccaggcgaaaaagagggttcttgaacctctgggcctggttgaggaacctgttaagacggctccgggaaaaaagaggccggtagagcactctcttgcggagccagactcctcctcgggaaccggaaaagcgggccagcagcctgcaagaaggagattgaatttcggtcagactggagacgcagactccgtacctgacccccagcctctcggacagccaccagcagccccctctggtctgggaactaatacgatggctacaggcagtggcgcaccaatggcagacaataacgagggcgccgacggagtgggtaattcctcgggaaattggcattgcgattccacatggatgggcgacagagtcatcaccaccagcacccgcacctgggctctgcccacctacaacaaccacctctacaggcagatttccagccaatcaggagcctcaaacgacaaccactactttggctacagcaccccttgggggtattttgacttcaacagattccactgccacttttcgccacgtgactggcaaagactcatcaacaacaattggggatcccggcccaaaagactcaacttcaagctctttaacattcaagtcaaggaggtcacgcagaatgacggtacgacgacgattgccaataaccttaccagcacggttcaggtgtttactgactcggagtaccagctcccgtacgtcctcggctcggcgcatcaaggatgcctcccgccgttcccagcagacgtcttcatggtgccacagtatggatacctcaccctgaacaacgggagtcaggcagtaggacgctcttcattttactgcctggagtactttccttctcagatgctgcgtaccggaaacaactttaccttcagctacacctttgaggacgttcctttccacagcagctacgcccacagccagagtttggaccgtctcatgaatcctctcgtcgaccagtacctgtattacttgagcagaacaaacactccaagcggaaccaccacgcagtcaaggcttcagttttctcaggccggagcaagtgacattcgggaccagtctaggaactggcttcctggaccctgttaccgccagcagcgagtatcaaagacatctgcggataacaacaacagtgaatactcgtggactggagctaccaagtaccaccttaatggaagagactctctggtgaatccgggcccggccatggccagccacaaggacgatgaagaaaagttttttcctcagagcggggttctcatctttggaaaacaagactcgggaaaaactaatgtggacattgaaaaggtcatgattacagacgaagaggaaatcaggaccaccaatcccgtggctacggagcagtatggttctgtatctaccaacctccagagcggcaacacacaagcagctacctcagatgtcaacacacaaggcgttcttccaggcatggtgtggcaggacagagacgtgtacctgcaggggcccatctgggcaaagattccacacacggacggacattttcacccctctcccctcatgggcggattcggacttaaacaccctcccccgcagattctcatcaagaacaccccggtacctgcgaatccttcgactaccttcagtgcggcaaagtttgcttccttcattacacagtactccacggggcaggtcagcgtggagatcgagtgggagctgcagaaggagaacagcaaacgctggaatcccgagattcagtacacttccaactacaacaaatctgttaatgtggactttactgtggacactaatggtgtgtattcagagcctcgccccattggcaccagatacctgactcgtaatctgtaa

SEQ ID NO: 324 - protein, 735 aa, Artificial Sequence
  source: /note="Description of Artificial Sequence: Synthetic polypeptide"
MAADGYLPDWLEDTLSEGIRQWWKLKPGPPPPKPAERHKDDSRGLVLPGYKYLGPFNGLDKGEPVNEADAAALEHDKAYDRQLDGGDNPYLKYNHADAEFQERLKEDTSFGGNLGRAVFQAKKRVLEPLGLVEEPVKTAPGKKRPVEHSLAEPDSSSGTGKAGQQPARRRLNFGQTGDADSVPDPQPLGQPPAAPSGLGTNTMATGSGAPMADNNEGADGVGNSSGNWHCDSTWMGDRVITTSTRTWALPTYNNHLYRQISSQSGASNDNHYFGYSTPWGYFDFNRFHCHFSPRDWQRLINNNWGSRPKRLNFKLFNIQVKEVTQNDGTTTIANNLTSTVQVFTDSEYQLPYVLGSAHQGCLPPFPADVFMVPQYGYLTLNNGSQAVGRSSFYCLEYFPSQMLRTGNNFTFSYTFEDVPFHSSYAHSQSLDRLMNPLVDQYLYYLSRTNTPSGTTTQSRLQFSQAGASDIRDQSRNWLPGPCYRQQRVSKTSADNNNSEYSWTGATKYHLNGRDSLVNPGPAMASHKDDEEKFFPQSGVLIFGKQDSGKTNVDIEKVMITDEEEIRTTNPVATEQYGSVSTNLQSGNTQAATSDVNTQGVLPGMVWQDRDVYLQGPIWAKIPHTDGHFHPSPLMGGFGLKHPPPQILIKNTPVPANPSTTFSAAKFASFITQYSTGQVSVEIEWELQKENSKRWNPEIQYTSNYNKSVNVDFTVDTNGVYSEPRPIGTRYLTRNL

SEQ ID NO: 325 - protein, 738 aa, Artificial Sequence
  source: /note="Description of Artificial Sequence: Synthetic polypeptide"
MAADGYLPDWLEDNLSEGIREWWDLKPGAPKPKANQQKQDDGRGLVLPGYKYLGPFNGLDKGEPVNAADAAALEHDKAYDQQLKAGDNPYLRYNHADAEFQERLQEDTSFGGNLGRAVFQAKKRVLEPLGLVEEAAKTAPGKKRPVEPSPQRSPDSSAGIGKKGQQPAKKRLNFGQTGDSESVPDPQPIGEPPAGPSGLGSGTMAAGGGAPMADNNEGADGVGSSSGNWHCDSTWLGDRVITTSTRTWALPTYNNHLYKQISNGTSGGSTNDNTYFGYSTPWGYFDFNRFHCHFSPRDWQRLINNNWGFRPKRLSFKLFNIQVKEVTQNEGTETIANNLTSTIQVFTDSEYQLPYVLGSAHQGCLPPFPADVFMIPQYGYLTLNNGSQAVGRSSFYCLEYFPSQMLRTGNNFEFSYTFEDVPFHSSCAHSQSSDRLMNPLIDQYLYYLSRTRSTGGTQGTQQLLFSQAGPANMSAQAKNWLPGPCYRQQRVSTTLSQNNNSNFAWTGATKYHLNGRDSLVNPGVAMATHKDDEERFFPSSGVLMFGKQGAGRDNVDYSSVMLTSEEEIKTTNPVATEQYGVVADNLQQTNTGPIVGNVNSQGALPGMVWQNRDVYLQGPIWAKIPHTDGNFHPSPLMGGFGLKHPPPQILIKNTPVPADPPTTFSQAKLASFITQYSTGQVSVEIEWELQKENSKRWNPEIQYTSNYYKSTNVDFAVNTEGTYSEPRPIGTRYLTRNL

SEQ ID NO: 326 - DNA, 2217 bp, Artificial Sequence
  source: /note="Description of Artificial Sequence: Synthetic polynucleotide"
atggctgctgacggttatcttccagattggctcgaggacaacctctctgagggcattcgcgagtggtgggacctgaaacctggagcccccaagcccaaggccaaccagcagaagcaggacgacggccggggtctggtgcttcttggctacaagtacctcggacccttcaacggactcgacaagggggagcccgtcaatgcggcggacgcagcggccctcgagcacgacaaggcctacgaccagcagctcaaagcgggtgacaatccgtacctgcggtataaccacgccgacgccgagtttcaggagcgtctgcaagaagatacgtcttttgggggcaacctcgggcgagcagtcttccaggccaagaagcgggttctcgaacctctcggtctggttgaggaagctgctaagacggctcctggaaagaagagaccggtagaaccgtcacctcagcgttcccccgactcctccacgggcatcggcaagaaaggccagcagcccgctaaaaagagactgaactttggtcagactggcgactcagagtcagtccccgaccctcaaccaatcggagaaccaccagcaggcccctctggtctgggatctggtacaatggctgcaggcggtggcgctccaatggcagacaataacgaaggcgccgacggagtgggtagttcctcaggaaattggcattgcgattccacatggctgggcgacagagtcatcaccaccagcacccgaacctgggccctgcccacctacaacaaccacctctacaagcaaatatccaatgggacatcgggaggaagcaccaacgacaacacctacttcggctacagcaccccctgggggtattttgacttcaacagattccactgccacttctcaccacgtgactggcagcgactcatcaacaacaactggggattccggccaaaaagactcagcttcaagctcttcaacatccaggtcaaggaggtcacgcagaatgaaggcaccaagaccatcgccaataaccttaccagcacgattcaggtatttacggactcggaataccagctgccgtacgtcctcggctccgcgcaccagggctgcctgcctccgttcccggcggacgtcttcatgattccccagtacggctaccttacactgaacaatggaagtcaagccgtaggccgttcctccttctactgcctggaatattttccatctcaaatgctgcgaactggaaacaattttgaattcagctacaccttcgaggacgtgcctttccacagcggctacgcacacagccagagcttggaccgactgatgaatcctctcatcgaccagtacctgtactacttatccagaactcagtccacaggaggaactcaaggtacccagcaattgttattttctcaagctgggcctgcaaacatgtcggctcaggctaagaactggctacctggaccttgctaccggcagcagcgagtctctacgacactgtcgcaaaacaacaacagcaactttgcttggactggtgccaccaaatatcacctgaacggaagagactctttggtaaatcccggtgtcgccatggcaacccacaaggacgacgaggaacgcttcttcccgtcgagtggagtcctgatgtttggaaaacagggtgctggaagagacaatgtggactacagcagcgttatgctaaccagcgaagaagaaattaaaaccactaaccctgtagccacagaacaatacggtgtggtggctgacaacttgcagcaaaccaatacagggcctattgtgggaaatgtcaacagccaaggagccttacctggcatggtctggcagaaccgagacgtgtacctgcagggtcccatctgggccaagattcctcacacggacggcaacttccacccttcaccgctaatgggaggatttggactgaagcacccacctcctcagatcctgatcaagaacacgccggtacctgcggatcctccaacgacgttcagccaggcgaaattggcttccttcattacgcagtacagcaccggacaggtcagcgtggaaatcgagtgggagctgcagaaggagaacagcaaacgctggaacccagagattcagtacacttcaaactactacaaatctacaaatgtggactttgctgtcaatacagagggaacttattctgagcctcgccccattggtactcgttacctcacccgtaatctgtaa

SEQ ID NO: 327 - protein, 738 aa, Artificial Sequence
  source: /note="Description of Artificial Sequence: Synthetic polypeptide"
MAADGYLPDWLEDNLSEGIREWWDLKPGAPKPKANQQKQDDGRGLVLLGYKYLGPFNGLDKGEPVNAADAAALEHDKAYDQQLKAGDNPYLRYNHADAEFQERLQEDTSFGGNLGRAVFQAKKRVLEPLGLVEEAAKTAPGKKRPVEPSPQRSPDSSTGIGKKGQQPAKKRLNFGQTGDSESVPDPQPIGEPPAGPSGLGSGTMAAGGGAPMADNNEGADGVGSSSGNWHCDSTWLGDRVITTSTRTWALPTYNNHLYKQISNGTSGGSTNDNTYFGYSTPWGYFDFNRFHCHFSPRDWQRLINNNWGFRPKRLSFKLFNIQVKEVTQNEGTKTIANNLTSTIQVFTDSEYQLPYVLGSAHQGCLPPFPADVFMIPQYGYLTLNNGSQAVGRSSFYCLEYFPSQMLRTGNNFEFSYTFEDVPFHSGYAHSQSLDRLMNPLIDQYLYYLSRTQSTGGTQGTQQLLFSQAGPANMSAQAKNWLPGPCYRQQRVSTTLSQNNNSNFAWTGATKYHLNGRDSLVNPGVAMATHKDDEERFFPSSGVLMFGKQGAGRDNVDYSSVMLTSEEEIKTTNPVATEQYGVVADNLQQTNTGPIVGNVNSQGALPGMVWQNRDVYLQGPIWAKIPHTDGNFHPSPLMGGFGLKHPPPQILIKNTPVPADPPTTFSQAKLASFITQYSTGQVSVEIEWELQKENSKRWNPEIQYTSNYYKSTNVDFAVNTEGTYSEPRPIGTRYLTRNL

SEQ ID NO: 328 - protein, 735 aa, Artificial Sequence
  source: /note="Description of Artificial Sequence: Synthetic polypeptide"
MAADGYLPDWLEDTLSEGIRQWWKLKPGPPPPKPAERHKDDSRGLVLPGYKYLGPFNGLDKGEPVNEADAAALEHDKAYDRQLDSGDNPYLKYNHADAEFQERLKEDTSFGGNLGRAVFQAKKRVLEPLGLVEPPVKTAPGKKRPVEHSPAEPDSSSGTGKAGQQPARKRLNFGQTGDADSVPDPQPLGQPPAAPSGLGSTTMATGSGAPMADNNEGADGVGNSSGNWHCDSQWLGDRVITTSTRTWALPTYNNHLYKQISSQSGASNDNHYFGYSTPWGYFDFNRFHCHFSPRDWQRLINNNWGFRPKRLNFKLFNIQVKEVTQNDGTTTIANNLTSTVQVFTDSEYQLPYVLGSAHQGCLPPFPADVFMVPQYGYLTLNNGSQAVGRSSFYCLEYFPSQMLRTGNNFQFSYTFEDVPFHSSYAHSQSLDRLMNPLIDQYLYYLNKTQSNSGTLQQSRLLFSQAGPTSMSLQAKNWLPGPCYRQQRLSKQANDNNNSNFPWTAATKYHLNGRDSLVNPGPAMASHKDDEEKFFPMHGTLIFGKQGTNANDADLDNVMITDEEEIRTTNPVATEQYGYVSNNLQNSNTGPTTGTVNHQGALPGMVWQDRDVYLQGPIWAKIPHTDGHFHPSPLMGGFGLKHPPPQIMIKNTPVPANPPTNFSSAKFASFITQYSTGQVSVEIEWELQKENSKRWNPEIQYTSNYNKSVNVDFTVDTNGVYSEPRPIGTRYLTRNL

SEQ ID NO: 329 - protein, 735 aa, Artificial Sequence
  source: /note="Description of Artificial Sequence: Synthetic polypeptide"
MAADGYLPDWLEDTLSEGIRQWWKLKPGPPPPKPAERHKDDSRGLVLPGYKYLGPFNGLDKGEPVNEADAAALEHDKAYDRQLDSGDNPYLKYNHADAEFQERLKEDTSFGGNLGRAVFQAKKRVLEPLGLVEGPVKTAPGKKRPVEHSPAEPDSSSGTGKAGQQPARKRLNFGQTGDADSVPDPQPLGQPPAAPSGLGSTTMATGSGAPMADNNEGADGVGNSSGNWHCDSQWLGDRVITTSTRTWALPTYNNHLYKQISSQSGASNDNHYFGYSTPWGYFDFNRFHCHFSPRDWQRLINNNWGFRPKRLNFKLFNIQVKEVTQNDGTTTIANNLTSTVQVFTDSEYQLPYVLGSAHQGCLPPFPADVFMVPQYGYLTLNNGSQAVGRSSFYCLEYFPSQMLRTGNNFQFSYTFEDVPFHSSYAHSQSLDRLMNPLIDQYLYYLNKTQSNSGTLQQSRLLFSQAGPTSMSLQAKNWLPGPCYRQQRLSKQANDNNNSNFPWTAATKYHLNGRDSLVNPGPAMASHKDDEEKFFPMHGTLIFGKQGTNANDADLDNVMITDEEEIRTTNPVATEQYGYVSNNLQNSNTGPTTGTVNHQGALPGMVWQDRDVYLQGPIWAKIPHTDGHFHPSPLMGGFGLKHPPPQIMIKNTPVPANPPTNFSSAKFASFITQYSTGQVSVEIEWELQKENSKRWNPEIQYTSNYNKSVNVDFTVDTNGVYSEPRPIGTRYLTRNL

SEQ ID NO: 330 - DNA, 2208 bp, Artificial Sequence
  source: /note="Description of Artificial Sequence: Synthetic polynucleotide"
atggctgccgatggttatcttccagattggctcgaggacactctctctgaaggaataagacagtggtggaagctcaaacctggcccaccaccaccaaagcccgcagagcggcataaggacgacagcaggggtcttgtgcttcctgggtacaagtacctcggacccttcaacggactcgacaagggggagccggtcaacgaggcagacgccgcggccctcgagcacgacaaggcctacgaccggcagctcgacagcggagacaacccgtacctcaagtacaaccacgccgacgcggagtttcaggagcgtcttaaagaagatacgtcttttgggggcaacctcggacgagcagtcttccaggcgaaaaagagggttcttgaacctctgggcctggttgagggacctgttaagacggctccgggaaaaaagaggccggtagagcactctcctgcggagccagactcctcctcgggaaccggaaaagcgggccagcagcctgcaagaaaaagattgaattttggtcagactggagacgcagactccgtacctgacccccagcctctcggacagccaccagcagccccctctggtttgggatctactacaatggctacaggcagtggcgcaccaatggcagacaataacgagggtgccgatggagtgggtaattcctcaggaaattggcattgcgattcccaatggctgggcgacagagtcatcaccaccagcacccgaacctgggccctgcccacctacaacaaccacctctacaagcaaatctcaagccaatcaggagcctcaaacgacaaccactactttggctacagcaccccttgggggtattttgacttcaacagattccactgccacttttcaccacgtgactggcaaagactcatcaacaacaactggggattccgacccaagagactcaacttcaagctctttaacattcaagtcaaagaggtcacgcagaatgacggtacgacgacgattgccaataaccttaccagcacggttcaggtgtttactgactcggagtaccagctcccgtacgtcctcgggtcggcgcatcaaggatgcctcccgccgtttccagcggacgtcttcatggtcccacagtatggatacctcaccctgaacaacgggagtcaggcggtaggacgctcttccttttactgcctggagtactttccttctcagatgcttcgtactggaaacaactttcagttcagctacacctttgaagacgttcctttccacagcagctacgctcacagccagagtctggatcggctgatgaatcctctgatcgaccagtacctgtattatctgaacaaaacacaatcaaatagtggaactcttcagcagtctcggctactgtttagtcaagctggacccaccagcatgtctcttcaagctaaaaactggctacctggaccttgctacagacagcagcgtctgtcaaagcaggcaaacgacaacaacaacagcaactttccctggactgcggctacaaagtatcacctaaatggccgggactcgttggttaatccaggaccagctatggccagtcacaaagacgatgaagaaaagtttttccccatgcatggaaccctgatatttggtaaacaaggaacaaatgctaacgacgcggatttggacaatgtcatgattacagatgaagaagaaatccgcaccaccaatcccgtggctacggagcagtacggatatgtgtcaaataatttgcaaaactcaaatactggtccaactactggaactgtcaatcaccaaggagcgttacctggcatggtgtggcaggatcgagacgtgtacctgcagggacccatttgggccaagattcctcacaccgatggacactttcatccttctccactgatgggaggttttgggctcaaacacccgcctcctcagatcatgatcaaaaacactcccgttccagccaatcctcccacaaacttcagttctgccaagtttgcttctttcatcacacagtattccacggggcaggtcagcgtggagatcgagtgggagctgcagaaagagaacagcaaacgctggaatcccgaaattcagtacacttccaactacaacaaatctgttaatgtggactttactgtggacactaatggcgtgtattcagagcctcgccccattggcaccagatacctgactcgtaatctgtaa

SEQ ID NO: 331 - DNA, 2211 bp, Artificial Sequence; identical to SEQ ID NO: 12
  source: /note="Description of Artificial Sequence: Synthetic polynucleotide"

SEQ ID NO: 332 - DNA, 2208 bp, Artificial Sequence
  source: /note="Description of Artificial Sequence: Synthetic polynucleotide"
atggctgccgatggttatcttccagattggctcgaggacactctctctgaaggaacaagacagtggtggaagctcaaacctggcccaccaccaccaaagcccgcagagcggcataaggacgacagcaggggtcttgtgcttcctgggtacaagtacctcggacccttcaacggactcgacaagggggagccggtcaacgaggcagacgccgcggccctcgagcacgacaaggcctacgaccggcagctcgacagcggagacaacccgtacctcaagtacaaccacgccgacgcggagtttcaggagcgtcttaaagaagatacgtcttttgggggcaacctcggacgagcagtcttccaggcgaaaaagagggttcttgaacctctgggcctggttgaggaacctgttaagacggctccgggaaaaaagaggccggtagagcactctcctgcggagccagactcctcctcgggaaccggaaaagcgggccagcagcctgcaagaaaaagattgaattttggtcagactggagacgcagactccgtacctgacccccagcctctcggacagccaccagcagccccctctggtttgggatctactacaatggctacaggcagtggcgcaccaatggcagacaataacgagggtgccgatggagtgggtaattcctcaggaaattggcattgcgattcccaatggctgggcgacagagtcatcaccaccagcacccgaacctgggccctgcccacctacaacaaccacctctacaagcaaatctcaagccaatcaggagcctcaaacgacaaccactactttggctacagcaccccttgggggtattttgacttcaacagattccactgccacttttcaccacgtgactggcaaagactcatcaacaacaactggggattccgacccaagagactcaacttcaagctctttaacattcaagtcaaagaggtcacgcagaatgacggtacgacgacgattgccaataaccttaccagcacggttcaggtgtttactgactcggagtaccagctcccgtacgtcctcgggtcggcgcatcaaggatgcctcccgccgtttccagcggacgtcttcatggtcccacagtatggatacctcaccctgaacaacgggagtcaggcggtaggacgctcttccttttactgcctggagtactttccttctcagatgcttcgtactggaaacaactttcagttcagctacacctttgaagacgttcctttccacagcagctacgctcacagccagagtctggatcggctgatgaatcctctgatcgaccagtacctgtattatctgaacaaaacacaatcaaatagtggaactcttcagcagtctcggctactgtttagtcaagctggacccaccagcatgtctcttcaagctaaaaactggctacctggaccttgctacagacagcagcgtctgtcaaagcaggcaaacgacaacaacaacagcaactttccctggactgcggctacaaagtaccacctaaatggccgggactcgttggttaatccaggaccagctatggccagtcacaaagacgatgaagaaaagtttttccccatgcatggaaccctgatatttggtaaacaaggaacaaatgctaacgacgcggatttggacaatgtcatgattacagatgaagaagaaatccgcaccaccaatcccgtggctacggagcagtacggatatgtgtcaaataatttgcaaaactcaaatactggtccaactactggaactgtcaatcaccaaggagcgttacctggcatggtgtggcaggatcgagacgtgtacctgcagggacccatttgggccaagattcctcacaccgatggacactttcatccttctccactgatgggaggttttgggctcaaacacccgcctcctcagatcatgatcaaaaacactcccgttccagccaatcctcccacaaacttcagttctgccaagtttgcttctttcatcacacagtattccacggggcaggtcagcgtggagatcgagtgggagctgcagaaagagaacagcaaacgctggaatcccgaaattcagtacacttccaactacaacaaatctgttaatgtggactttactgtggacactaatggcgtgtattcagagcctcgccccattggcaccagatacctgactcgtaatctgtaa

SEQ ID NO: 333 - DNA, 2217 bp, Artificial Sequence
  source: /note="Description of Artificial Sequence: Synthetic polynucleotide"
atggctgctgacggttatcttccagattggctcgaggacaacctctctgagggcattcgcgagtggtgggacctgaaacctggagcccccaagcccaaggccaaccagcagaagcaggacgacggccggggtctggtgcttcctggctacaagtacctcggacccttcaacggactcgacaagggggagcccgtcaacgcggcggacgcagcggccctcgagcacgacaaggcctacgaccagcagctcaaagcgggtgacaatccgtacctgcggtataaccacgccgacgccgagtttcaggagcgtctgcaagaagatacgtcttttgggggcaacctcgggcgagcagtcttccaggccaagaagcgggttctcgaacctctcggtctggttgaggaagctgctaagacggctcctggaaagaagagaccggtagaaccgtcacctcagcgttcccccgactcctccacgggcatcggcaagaaaggccagcagcccgctaaaaagagactgaactttggtcagactggcgactcagagtcagtccccgaccctcaaccaatcggagaaccacctgcaggcccctctggtctgggatctggtacaatggctgcaggcggtggcgctccaatggcagacaataacgaaggcgccgacggagtgggtagttcctcaggaaattggcattgcgattccacatggctgggcgacagagtcatcaccaccagcacccgaacctgggccctgcccacctacaacaaccacctctacaagcaaatatccaatgggacatcgggagggagcaccaacgacaacacctacttcggctacagcaccccctgggggtattttgacttcaacagattccactgccacttctcaccacgtgactggcagcgactcatcaacaacaactggggattccggccaaaaagactcagcttcaagctcttcaacatccaggtcaaggaggtcacgcagaatgaaggcaccaagaccatcgccaataaccttaccagcacgattcaggtatttacggactcggaataccagctgccgtacgtcctcggctccgcgcaccagggctgcctgcctccgttcccggcggacgtcttcatgattccccagtacggctaccttacactgaacaatggaagtcaagccgtaggccgttcctccttctactgcctggaatattttccatctcaaatgctgcgaactggaaacaattttgaattcagctacaccttcgaggacgtgcctttccacagcagctacgcacacagccagagcttggaccgactgatgaatcctctcatcgaccagtacctgtactacttatccagaactcagtccacaggaggaactcaaggtacccagcaattgttattttctcaagctgggcctgcaaacatgtcggctcaggctaagaactggctacctggaccttgctaccggcagcagcgagtctctacgacactgtcgcaaaacaacaacagcaactttgcttggactggtgccaccaaatatcacctgaacggaagagactctttggtaaatcccggtgtcgccatggcaacccacaaggacgacgaggaacgcttcttcccgtcgagtggagtcctgatgtttggaaaacagggtgctggaagagacaatgtggactacagcagcgttatgctaaccagcgaagaagaaattaaaaccactaaccctgtagccacagaacaatacggtgtggtggctgacaacttgcagcaaaccaatacagggcctattgtgggaaatgtcaacagccaaggagccttacctggcatggtctggcagaaccgagacgtgtacctgcagggtcccatctgggccaagattcctcacacggacggcaactgccacccttcaccgctaatgggaggatttggactgaagcacccacctcctcagatcctgatcaagaacacgccggtacctgcggatcctccaacaacgttcagccaggcgaaattggcttccttcattacgcagtacagcaccggacaggtcagcgtggaaatcgagtgggagctgcagaaggagaacagcaaacgctggaacccagagattcagtacacttcaaactactacaaatctacaaatgtggactttgctgtcaatacagagggaacttattctgagcctcgccccattggtactcgttacctcacccgtaatctgtaa

SEQ ID NO: 334 - protein, 735 aa, Artificial Sequence
  source: /note="Description of Artificial Sequence: Synthetic polypeptide"
MAADGYLPDWLEDTLSEGTRQWWKLKPGPPPPKPAERHKDDSRGLVLPGYKYLGPFNGLDKGEPVNEADAAALEHDKAYDRQLDSGDNPYLKYNHADAEFQERLKEDTSFGGNLGRAVFQAKKRVLEPLGLVEEPVKTAPGKKRPVEHSPAEPDSSSGTGKAGQQPARKRLNFGQTGDADSVPDPQPLGQPPAAPSGLGSTTMATGSGAPMADNNEGADGVGNSSGNWHCDSQWLGDRVITTSTRTWALPTYNNHLYKQISSQSGASNDNHYFGYSTPWGYFDFNRFHCHFSPRDWQRLINNNWGFRPKRLNFKLFNIQVKEVTQNDGTTTIANNLTSTVQVFTDSEYQLPYVLGSAHQGCLPPFPADVFMVPQYGYLTLNNGSQAVGRSSFYCLEYFPSQMLRTGNNFQFSYTFEDVPFHSSYAHSQSLDRLMNPLIDQYLYYLNKTQSNSGTLQQSRLLFSQAGPTSMSLQAKNWLPGPCYRQQRLSKQANDNNNSNFPWTAATKYHLNGRDSLVNPGPAMASHKDDEEKFFPMHGTLIFGKQGTNANDADLDNVMITDEEEIRTTNPVATEQYGYVSNNLQNSNTGPTTGTVNHQGALPGMVWQDRDVYLQGPIWAKIPHTDGHFHPSPLMGGFGLKHPPPQIMIKNTPVPANPPTNFSSAKFASFITQYSTGQVSVEIEWELQKENSKRWNPEIQYTSNYNKSVNVDFTVDTNGVYSEPRPIGTRYLTRNL

SEQ ID NO: 335 - DNA, 2208 bp, Artificial Sequence
  source: /note="Description of Artificial Sequence: Synthetic polynucleotide"
atggctgccgatggttatcttccagattggctcgaggacactctctctgaaggaataagacagtggtggaagctcaaacctggcccaccaccaccaaagcccgcagagcggcatcaggacaacagcaggggtcttgtgcttcctgggtacaagtacctcggaccctccaacggactcgacaaaggagagccggtcaacgaggcagacgccgcggccctcgagcacgacaaggcctacgaccggcagctcgacagcggagacaacccgtacctcaagtacaaccacgccgacgcggagtttcaggagcgtcttaaagaagatacgtcttttgggggcaacctcggacgagcagtcttccaggcgaaaaagagggttcttgaacctctgggcctggttgaggaacctgttaagacggctccgggaaaaaagaggccggtagagcactctcctgtggagccagactcctcctcgggaaccggaaaagcgggccatcagcctgcgagaaagagattgaattttggtcagactggagacgcagactccgtacctgacccccagcctctcggacagccaccagcagcccccacaagtttgggatctactacaatggctacaggcagtggcgcaccaatggcagacaataacgagggtgccgatggagtgggtaattcctcaggaaattggcattgcgattcccaatggctgggcgacagagtcatcaccaccagcacccgaacctgggccctgcccacctacaacaaccacctctacaagcaaatctccagccaatcaggagcctcgaacgacaaccactactttggctgcagcaccccctgggggtattttgacttcaacagattccactgtcacttctccccacgtgattggcaaagactcatcaacaacaactggggattccgacccaagagactcaacttcaagctctttaacattcaagtcaaagaggtcacgcagaatgacggtacgacgacgattgccaataaccttaccagcacggttcaggtgtttactgactcggagtacccgctcccgtacgtcctcggctcggcgcatcaaggatgcctcccgccgtttccagcggacgtcttcatggtcccacagtatggatacctcaccctgaacaacgggagtcaggcggtaggacgctcttccttttactgcctggagtactttccttctcagatgctgcgtaccggaaacaactttaccttcagctacacctttgaggacgttcctttccacagcagctacgctcacagccagagtttggaccggctgatgaatcctctgatcgaccagtatctatattatctgaacaggacacaatcaaatagtggaactcttcagcagtctaggctactgtttagccaagctggacccaccagcatgtctcttcaagctaaaaactggctgcctggaccttgctacagacagcagcgtctttcaaagcaggcaaacgacaacaacaacagcaactttccctggactgcggctacaaagtatcatctaaatggccgggactcgttggttaatccaggaccagctatggccagccacaaagacgatgaagaaaagtttttccccatgcatggaaccctgatatttggtaaacaaggaacaaatgctaacgacgcggatttggagcatgttatgattacagatgaagaagaaatcaggaccaccaatcctgtggctacagagcagtacggaaacgtgtcaaataatttgcaaaactcaaatactggtccaactacagaaaatgtcaatcaccagggagcgttacctggtatggtgtggcaggatcgagacgtgtacctgcagggacccatttgggccaagattcctcacaccgacggacactttcacccttctccactgatgggaggttttggactcaaacacccgcctcctcaaatcatgatcaaaaacactcccgttccagccaatcctcccacaaacttcagttctgccaagtttgcttctttcatcacacagtattccacgggccaggtcagcgtggagattgagtgggagctgcagaaggagaacagcaaacgctggaaccccgagatccagtatacttccaactacaacaaatctgttaatgtggactttactgtggacactaatggtgtgtattcagagccttgccccattggcaccagatacctgactcgtaatctgtaa

SEQ ID NO: 336 - protein, 735 aa, Artificial Sequence
  source: /note="Description of Artificial Sequence: Synthetic polypeptide"
MAADGYLPDWLEDTLSEGIRQWWKLKPGPPPPKPAERHQDNSRGLVLPGYKYLGPSNGLDKGEPVNEADAAALEHDKAYDRQLDSGDNPYLKYNHADAEFQERLKEDTSFGGNLGRAVFQAKKRVLEPLGLVEEPVKTAPGKKRPVEHSPVEPDSSSGTGKAGHQPARKRLNFGQTGDADSVPDPQPLGQPPAAPTSLGSTTMATGSGAPMADNNEGADGVGNSSGNWHCDSQWLGDRVITTSTRTWALPTYNNHLYKQISSQSGASNDNHYFGCSTPWGYFDFNRFHCHFSPRDWQRLINNNWGFRPKRLNFKLFNIQVKEVTQNDGTTTIANNLTSTVQVFTDSEYPLPYVLGSAHQGCLPPFPADVFMVPQYGYLTLNNGSQAVGRSSFYCLEYFPSQMLRTGNNFTFSYTFEDVPFHSSYAHSQSLDRLMNPLIDQYLYYLNRTQSNSGTLQQSRLLFSQAGPTSMSLQAKNWLPGPCYRQQRLSKQANDNNNSNFPWTAATKYHLNGRDSLVNPGPAMASHKDDEEKFFPMHGTLIFGKQGTNANDADLEHVMITDEEEIRTTNPVATEQYGNVSNNLQNSNTGPTTENVNHQGALPGMVWQDRDVYLQGPIWAKIPHTDGHFHPSPLMGGFGLKHPPPQIMIKNTPVPANPPTNFSSAKFASFITQYSTGQVSVEIEWELQKENSKRWNPEIQYTSNYNKSVNVDFTVDTNGVYSEPCPIGTRYLTRNL

SEQ ID NO: 337 - DNA, 2214 bp, Artificial Sequence
  source: /note="Description of Artificial Sequence: Synthetic polynucleotide"
atggctgccgatggttatcttccagattggctcgaggacaaccttagtgaaggaattcgcgagtggtgggctttgaaacctggagcccctcaacccaaggcaaatcaacaacatcaagacaacgctcgaggtcttgtgcttccgggttacaaataccttggacccggcaacggactcgacaagggggagccggtcaacgcagcagacgcggcggccctcgagcacgacaaggcctacgaccagcagctgcaggcgggtgacaatccgtacctgcggtataaccacgccgacgccgagtttcaggagcgtctgcaagaagatacgtcttttgggggcaaccttggcagagcagtcttccaggccaaaaagaggatccttgagcctcttggtctggttgaggaagcagctaaaacggctcctggaaagaagaggcctgtagatcagtctcctcaggaaccggactcatcatctggtgttggcaaatcgggcaaacagcctgccagaaaaagactaaatttcggtcagactggcgactcagagtcagtcccagaccctcaacctctcggagaaccaccagcagcccccacaagtttgggatctaatacaatggcttcaggcggtggcgcaccaatggcagacaataacgagggtgccgatggggtgggtagttcctcgggaaattggcattgcgattcccaatggctgggggacagagtcatcaccaccagcacccgaacctgggccctgcccacctacaacaatcacctctacaagcaaatctccaacgggacatcgggaggagccaccaacgacaacacctacttcggctacagcaccccctgggggtattttgactttaacagattccactgccacttttcaccacgtgactggcagcgactcatcaacaacaactggggattccggcccaagagactcagcttcaagctcttcaacatccaggtcaaggaggtcacgcagaatgaaggcaccaagaccatcgccaataacctcaccagcaccatccaggtgtttacggactcggagtaccagctgccgtacgttctcggctctgcgcaccagggctgcctccctccgttcccggcggacgtgttcatgattccgcaatacggctacctgacgctcaacaatggcagccaagccgtgggacgttcatccttttactgcctggaatatttcccttctcagatgctgagaacgggcaacaactttaccttcagctacacctttgaggaagtgcctttccacagcagctacgcgcacagccagagcttggaccggctgatgaatcctctgattgaccagtacctgtactacttgtctcggactcaaacaacaggaggcacggcaaatacgcagactctgggcttcagccaaggtgggcctaatacaatggccaatcaggcaaagaactggctgccaggaccctgttaccgccaacaacgcgtctcaacgacaaccgggcaaaacaacaatagcaactttgcctggactgctgggaccaaataccatctgaatggaagaaattcattggctaatcctggcatcgctatggcaacacacaaagacgacgaggagcgtttttttcccagtaacgggatcctgatttttggcaaacaaaatgctgccagagacaatgcggattacagcgatgtcatgctcaccagcgaggaagaaatcaaaaccactaaccctgtggctacagaggaatacggtatcgtggcagataacttgcagcagcaaaacacggctcctcaaattggaactgtcaacagccagggggccttacccggtatggtctggcagaaccgggacgtgtacctgcagggtcccatctgggccaagattcctcacacggacggcaacttccacccgtctccgctgatgggcggctttggcctgaaacatcctccgcctcagatcctgatcaagaacacgcctgtacctgcggatcctccgaccaccttcaaccagtcaaagctgaactctttcatcacgcaatacagcaccggacaggtcagcgtggagatcgagtgggagctgcagaaggaaaacagcaagcgctggaacccggagatccagtacacttccaactattacaagtctaataatgttgaatttgctgttaatactgaaggtgtatatagtgaaccccgccccattggcaccagatacctgactcgtaatctgtaa

SEQ ID NO: 338 - protein, 737 aa, Artificial Sequence
  source: /note="Description of Artificial Sequence: Synthetic polypeptide"
MAADGYLPDWLEDNLSEGIREWWALKPGAPQPKANQQHQDNARGLVLPGYKYLGPGNGLDKGEPVNAADAAALEHDKAYDQQLQAGDNPYLRYNHADAEFQERLQEDTSFGGNLGRAVFQAKKRILEPLGLVEEAAKTAPGKKRPVDQSPQEPDSSSGVGKSGKQPARKRLNFGQTGDSESVPDPQPLGEPPAAPTSLGSNTMASGGGAPMADNNEGADGVGSSSGNWHCDSQWLGDRVITTSTRTWALPTYNNHLYKQISNGTSGGATNDNTYFGYSTPWGYFDFNRFHCHFSPRDWQRLINNNWGFRPKRLSFKLFNIQVKEVTQNEGTKTIANNLTSTIQVFTDSEYQLPYVLGSAHQGCLPPFPADVFMIPQYGYLTLNNGSQAVGRSSFYCLEYFPSQMLRTGNNFTFSYTFEEVPFHSSYAHSQSLDRLMNPLIDQYLYYLSRTQTTGGTANTQTLGFSQGGPNTMANQAKNWLPGPCYRQQRVSTTTGQNNNSNFAWTAGTKYHLNGRNSLANPGIAMATHKDDEERFFPSNGILIFGKQNAARDNADYSDVMLTSEEEIKTTNPVATEEYGIVADNLQQQNTAPQIGTVNSQGALPGMVWQNRDVYLQGPIWAKIPHTDGNFHPSPLMGGFGLKHPPPQILIKNTPVPADPPTTFNQSKLNSFITQYSTGQVSVEIEWELQKENSKRWNPEIQYTSNYYKSNNVEFAVNTEGVYSEPRPIGTRYLTRNL

SEQ ID NO: 339 - DNA, 2211 bp, Artificial Sequence
  source: /note="Description of Artificial Sequence: Synthetic polynucleotide"
atggctgccgatggttatcttccagattggctcgaggacaacctctctgagggcattcgcgagtggtgggacttgaaacctggagccccgaagcccaaagccaaccagcaaaagcaggacgacggccggggtctggtgcttcctggctacaagtacctcggacccttcaacggactcgacaagggggagcccgtcaacgcggcggacgcagcggccctcgagcacgacaaggcctacgaccagcagctcaaagcgggtgacaatccgtacctgcggtataaccacgccgacgccgagtttcaggagcgtctgcaagaagatacgtcttttgggggcaacctcgggcgagcagtcttccaggccaagaagcgggttctcgaacctctcggtctggttgaggaaggcgctaagacggctcctggaaagaaacgtccggtagagcagtcgccacaagagccagactcctcctcgggcatcggcaagacaggccagcagcccgctaaaaagagactcaattttggtcagactggcgactcagagtcagtccccgacccacaacctctcggagaacctccagcaacccccgctgctgtgggacctactacaatggcttcaggcggtggcgcaccaatggcagacaataacgaaggcgccgacggagtgggtaatgcctcaggaaattggcattgcgattccacatggctgggcgacagagtcatcaccaccagcacccgaacatgggccttgcccacctataacaaccacctctacaagcaaatctccagtgcttcaacgggggccagcaacgacaaccactacttcggctacagcaccccctgggggtattttgatttcaacagattccactgccatttctcaccacgtgactggcagcgactcatcaacaacaattggggattccggcccaagagactcaacttcaagctcttcaacatccaagtcaaggaggtcacgacgaatgatggcgtcacgaccatcgctaataaccttaccagcacggttcaagtcttctcggactcggagtaccagctgccgtacgttctcggctctgcccaccagggctgcctgcctccgttcccggcggacgtgttcatgattccccagtacggctacctaacactcaacaacggtagtcaggccgtgggacgctcctccttctactgcctggaatactttccttcgcagatgctgagaaccggcaacaacttccagtttacttacaccttcgaggacgtgcctttccacagcagctacgcccacagccagagcttggaccggctgatgaatcctctgattgaccagtacctgtactacttgtctcggactcaaacaacaggaggcacggcaaatacgcagactctgggcttcagccaaggtgggcctaatacaatggccaatcaggcaaagaactggctgccaggaccctgttaccgccaacaacgcgtctcaacgacaaccgggcaaaacaacaatagcaattttacctggactggtgcttcaaaatataacctcaatgggcgtgaatccatcatcaaccctggcactgctatggcctcacacaaagacgacgaagacaagttctttcccatgagcggtgtcatgatttttggaaaagagagcgccggagcttcaaacactgcattggacaatgtcatgattacagacgaagaggaaattaaagccactaaccctgtggccaccgaaagatttgggaccgtggcagtcaatttccagagcagcagcacagaccctgcgaccggagatgtgcatgctatgggagcattacctggcatggtgtggcaagatagagacgtgtacctgcagggtcccatttgggccaaaattcctcacacagatggacactttcacccgtctcctcttatgggcggctttggactcaagaacccgcctcctcagatcctcatcaaaaacacgcctgttcctgcgaatcctccggcggagttttcagctacaaagtttgcttcattcatcacccaatactccacaggacaagtgagtgtggaaattgaatgggagctgcagaaagaaaacagcaagcgctggaatcccgaagtgcagtacacatccaattatgcaaaatctgccaacgttgattttactgtggacaacaatggactttatactgagcctcgccccattggcacccgttacctcacccgtcccctgtaa

SEQ ID NO: 340 - protein, 736 aa, Artificial Sequence
  source: /note="Description of Artificial Sequence: Synthetic polypeptide"
MAADGYLPDWLEDNLSEGIREWWDLKPGAPKPKANQQKQDDGRGLVLPGYKYLGPFNGLDKGEPVNAADAAALEHDKAYDQQLKAGDNPYLRYNHADAEFQERLQEDTSFGGNLGRAVFQAKKRVLEPLGLVEEGAKTAPGKKRPVEQSPQEPDSSSGIGKTGQQPAKKRLNFGQTGDSESVPDPQPLGEPPATPAAVGPTTMASGGGAPMADNNEGADGVGNASGNWHCDSTWLGDRVITTSTRTWALPTYNNHLYKQISSASTGASNDNHYFGYSTPWGYFDFNRFHCHFSPRDWQRLINNNWGFRPKRLNFKLFNIQVKEVTTNDGVTTIANNLTSTVQVFSDSEYQLPYVLGSAHQGCLPPFPADVFMIPQYGYLTLNNGSQAVGRSSFYCLEYFPSQMLRTGNNFQFTYTFEDVPFHSSYAHSQSLDRLMNPLIDQYLYYLSRTQTTGGTANTQTLGFSQGGPNTMANQAKNWLPGPCYRQQRVSTTTGQNNNSNFTWTGASKYNLNGRESIINPGTAMASHKDDEDKFFPMSGVMIFGKESAGASNTALDNVMITDEEEIKATNPVATERFGTVAVNFQSSSTDPATGDVHAMGALPGMVWQDRDVYLQGPIWAKIPHTDGHFHPSPLMGGFGLKNPPPQILIKNTPVPANPPAEFSATKFASFITQYSTGQVSVEIEWELQKENSKRWNPEVQYTSNYAKSANVDFTVDNNGLYTEPRPIGTRYLTRPL

SEQ ID NO: 341 - DNA, 2211 bp, Artificial Sequence
  source: /note="Description of Artificial Sequence: Synthetic polynucleotide"
atggctgctgacggttatcttccagattggctcgaggacaacctttctgaaggcattcgagagtggtgggcgctgcaacctggagcccctaaacccaaggcaaatcaacaacatcaggacaacgctcggggtcttgtgcttccgggttacaaatacctcggacccggcaacggactcgacaagggggaacccgtcaacgcagcggacgcggcagccctcgagcacgacaaggcctacgaccagcagctcaaggccggtgacaacccctacctcaagtacaaccacgccgacgccgagttccaggagcggctcaaagaagatacgtcttttgggggcaacctcgggcgagcagtcttccaggccaaaaagaggcttcttgaacctcttggtctggttgaggaagcggctaagacggctcctggaaagaagaggcctgtagatcagtctcctcaggaaccggactcatcatctggtgttggcaaatcgggcaaacagcctgccagaaaaagactaaatttcggtcagactggcgactcagagtcagtcccagaccctcaacctctcggagaaccaccagcagcccccacaagtttgggatctaatacaatggcttcaggcggtggcgcaccaatggcagacaataacgagggtgccgatggagtgggtaattcctcaggaaattggcattgcgattcccaatggctgggcgacagagtcatcaccaccagcaccagaacctgggccctgcccacttacaacaaccatctctacaagcaaatctccagccaatcaggagcttcaaacgacaaccactactttggctacagcaccccttgggggtattttgactttaacagattccactgccacttctcaccacgtgactggcagcgactcattaacaacaactggggattccggcccaagaaactcagcttcaagctcttcaacatccaagttaaagaggtcacgcagaacgatggcacgacgactattgccaataaccttaccagcacggttcaagtgtttacggactcggagtatcagctcccgtacgtgctcgggtcggcgcaccaaggctgtctcccgccgtttccagcggacgtcttcatggtccctcagtatggatacctcaccctgaacaacggaagtcaagcggtgggacgctcatccttttactgcctggagtacttcccttcgcagatgctaaggactggaaataacttccaattcagctataccttcgaggatgtaccttttcacagcagctacgctcacagccagagtttggatcgcttgatgaatcctcttattgatcagtatctgtactacctgaacagaacgcaaggaacaacctctggaacaaccaaccaatcacggctgctttttagccaggctgggcctcagtctatgtctttgcaggccagaaattggctacctgggccctgctaccggcaacagagactttcaaagactgctaacgacaacaacaacagtaactttccttggacagcggccagcaaatatcatctcaatggccgcgactcgctggtgaatccaggaccagctatggccagtcacaaggacgatgaagaaaaatttttccctatgcacggcaatctaatatttggcaaagaagggacaacggcaagtaacgcagaattagataatgtaatgattacggatgaagaagagattcgtaccaccaatcctgtggcaacagagcagtatggaactgtggcaaataacttgcagagctcaaatacagctcccacgactagaactgtcaatgatcagggggccttacctggcatggtgtggcaagatcgtgacgtgtaccttcaaggacctatctgggcaaagattcctcacacggatggacactttcatccttctcctctgatgggaggctttggactgaaacatccgcctcctcaaatcatgatcaaaaatactccggtaccggcaaatcctccgacgactttcagcccggccaagtttgcttcatttatcactcagtactccactggacaggtcagcgtggaaattgagtgggagctacagaaagaaaacagcaaacgttggaatccagagattcagtacacttccaactacaacaagtctgttaatgtggactttactgtagacactaatggtgtttatagtgaacctcgccccattggcacccgttaccttacccgtcccctgtaa

SEQ ID NO: 342 - protein, 736 aa, Artificial Sequence
  source: /note="Description of Artificial Sequence: Synthetic polypeptide"
MAADGYLPDWLEDNLSEGIREWWALQPGAPKPKANQQHQDNARGLVLPGYKYLGPGNGLDKGEPVNAADAAALEHDKAYDQQLKAGDNPYLKYNHADAEFQERLKEDTSFGGNLGRAVFQAKKRLLEPLGLVEEAAKTAPGKKRPVDQSPQEPDSSSGVGKSGKQPARKRLNFGQTGDSESVPDPQPLGEPPAAPTSLGSNTMASGGGAPMADNNEGADGVGNSSGNWHCDSQWLGDRVITTSTRTWALPTYNNHLYKQISSQSGASNDNHYFGYSTPWGYFDFNRFHCHFSPRDWQRLINNNWGFRPKKLSFKLFNIQVKEVTQNDGTTTIANNLTSTVQVFTDSEYQLPYVLGSAHQGCLPPFPADVFMVPQYGYLTLNNGSQAVGRSSFYCLEYFPSQMLRTGNNFQFSYTFEDVPFHSSYAHSQSLDRLMNPLIDQYLYYLNRTQGTTSGTTNQSRLLFSQAGPQSMSLQARNWLPGPCYRQQRLSKTANDNNNSNFPWTAASKYHLNGRDSLVNPGPAMASHKDDEEKFFPMHGNLIFGKEGTTASNAELDNVMITDEEEIRTTNPVATEQYGTVANNLQSSNTAPTTRTVNDQGALPGMVWQDRDVYLQGPIWAKIPHTDGHFHPSPLMGGFGLKHPPPQIMIKNTPVPANPPTTFSPAKFASFITQYSTGQVSVEIEWELQKENSKRWNPEIQYTSNYNKSVNVDFTVDTNGVYSEPRPIGTRYLTRPL

SEQ ID NO: 343 - DNA, 2211 bp, Artificial Sequence
  source: /note="Description of Artificial Sequence: Synthetic polynucleotide"
atggctgccgatggttatcttccagattggctcgaggacaaccttagtgaaggaattcgcgagtggtgggctttgaaacctggagcccctcaacccaaggcaaatcaacaacatcaagacaacgctcgaggtcttgtgcttccgggttacaaataccttggacccggcaacggactcgacaagggggagccggtcaacgcagcagacgcggcggccctcgagcacgacaaggcctacgaccagcagctcaaggccggagacaacccgtacctcaagtacaaccacgccgacgccgagttccaggagcggctcaaagaagatacgtcttttgggggcaacctcgggcgagcagtcttccaggccaaaaagaggcttcttgaacctcttggtctggttgaggaagcggctaagacggctcctggaaagaagagaccggtagagccatcaccccagcgttctccagactcctctacgggcatcggcaagaaaggccaacagcccgctaaaaagagactcaattttggtcagactggcgactcagagtcagtccccgacccacaacctctcggagaacctccagcaacccccgctgctgtgggacctactacaatggcttcaggcggtggcgcaccaatggcagacaataacgagggtgccgatggagtgggtaattcctcaggaaattggcattgcgattcccaatggctgggcgacagagtcatcaccaccagcaccagaacctgggccctgcccacttacaacaaccatctctacaagcaaatctccagccaatcaggagcttcaaacgacaaccactactttggctacagcaccccttgggggtattttgactttaacagattccactgccacttttcaccacgtgactggcaaagactcatcaacaacaactggggattccgacccaagagactcaacttcaagctcttcaacatccaagtcaaggaggtcacgacgaatgatggcgtcacgaccatcgctaataaccttaccagcacggttcaagtcttctcggactcggagtaccagttgccgtacgtcctcggctctgcgcaccagggctgcctccctccgttcccggcggacgtgttcatgattccgcagtacggctacctaacgctcaacaatggcagccaagccgtgggacgttcatccttttactgcctggaatatttcccttctcagatgctgagaacgggcaacaactttaccttcagctacacttttgaggacgttcctttccacagcagctacgctcacagccagagtctggaccgtctcatgaatcctctcatcgaccagtacctgtattacttgagcagaacaaacactccaagtggaaccaccacgcagtcaaggcttcagttttctcaggccggagcgagtgacattcgggaccagtctaggaactggcttcctggaccctgttaccgccagcagcgcgtttctaaaacaaaaacagacaacaacaacagcaattttacctggactggtgcttcaaaatataaccttaatgggcgtgaatctataatcaaccctggcactgctatggcctcacacaaagacgacgaagacaagttctttcccatgagcggtgtcatgatttttggaaaagagagcgccggagcttcaaacactgcattggacaatgtcatgattacagacgaagaggaaattaaagccactaaccctgtggccaccgaaagatttgggaccgtggcagtcaatttccagagcagcagcacagaccctgcgaccggagatgtgcatgttatgggagccttacctggaatggtgtggcaagacagagacgtatacctgcagggtcctatttgggccaaaattcctcacacggatggacactttcacccgtctcctcttatgggcggctttggactcaagaacccgcctcctcagatcctcatcaaaaacacgcctgttcctgcgaatcctccggcggagttttcagctacaaagtttgcttcattcatcacccaatactccacaggacaagtgagtgtggaaattgaatgggagctgcagaaagaaaacagcaagcgctggaatcccgaagtgcagtacacatccaattatgcaaaatctgccaacgttgattttactgtggacaacaatggactttatactgagcctcgccccattggcacccgttaccttacccgtcccctgtaa

SEQ ID NO: 344 - protein, 736 aa, Artificial Sequence
  source: /note="Description of Artificial Sequence: Synthetic polypeptide"
MAADGYLPDWLEDNLSEGIREWWALKPGAPQPKANQQHQDNARGLVLPGYKYLGPGNGLDKGEPVNAADAAALEHDKAYDQQLKAGDNPYLKYNHADAEFQERLKEDTSFGGNLGRAVFQAKKRLLEPLGLVEEAAKTAPGKKRPVEPSPQRSPDSSTGIGKKGQQPAKKRLNFGQTGDSESVPDPQPLGEPPATPAAVGPTTMASGGGAPMADNNEGADGVGNSSGNWHCDSQWLGDRVITTSTRTWALPTYNNHLYKQISSQSGASNDNHYFGYSTPWGYFDFNRFHCHFSPRDWQRLINNNWGFRPKRLNFKLFNIQVKEVTTNDGVTTIANNLTSTVQVFSDSEYQLPYVLGSAHQGCLPPFPADVFMIPQYGYLTLNNGSQAVGRSSFYCLEYFPSQMLRTGNNFTFSYTFEDVPFHSSYAHSQSLDRLMNPLIDQYLYYLSRTNTPSGTTTQSRLQFSQAGASDIRDQSRNWLPGPCYRQQRVSKTKTDNNNSNFTWTGASKYNLNGRESIINPGTAMASHKDDEDKFFPMSGVMIFGKESAGASNTALDNVMITDEEEIKATNPVATERFGTVAVNFQSSSTDPATGDVHVMGALPGMVWQDRDVYLQGPIWAKIPHTDGHFHPSPLMGGFGLKNPPPQILIKNTPVPANPPAEFSATKFASFITQYSTGQVSVEIEWELQKENSKRWNPEVQYTSNYAKSANVDFTVDNNGLYTEPRPIGTRYLTRPL

SEQ ID NO: 345 - DNA, 2211 bp, Artificial Sequence
  source: /note="Description of Artificial Sequence: Synthetic polynucleotide"
atggctgccgatggttatcttccagattggctcgaggacaacctctctgagggcattcgcgagtggtgggacttgaaacctggagcccctaaacccaaggcaaatcaacaacatcaggacaacgctcgaggtcttgtgcttccgggttacaaataccttggacccggcaacggactcgacaagggggagccggtcaacgcagcagacgcggcggccctcgagcacgacaaggcctacgaccagcagctcaaggccggagacaacccgtacctcaagtacaaccacgccgacgccgagttccaggagcggctcaaagaagatacgtcttttgggggcaacctcgggcgagcagtcttccaggccaaaaagaggcttcttgaacctcttggtctggttgaggaagcggctaagacggctcctggaaagaagagaccggtagagccatcaccccagcgttctccagactcctctacgggcatcggcaagaaaggccaacagcccgctaaaaagagactcaattttggtcagactggcgactcagagtcagtccccgacccacaacctctcggagaacctccagcaacccccgctgctgtgggacctactacaatggcttcaggcggtggcgcaccaatggcagacaataacgagggtgccgatggagtgggtaattcctcaggaaattggcattgcgattcccaatggctgggcgacagagtcatcaccaccagcaccagaacctgggccctgcccacttacaacaaccatctctacaagcaaatctccagccaatcaggagcttcaaacgacaaccactactttggctacagcaccccttgggggtattttgactttaacagattccactgccacttttcaccacgtgactggcaaagactcatcaacaacaactggggattccgacccaagagactcaacttcaagctcttcaacatccaagtcaaggaggtcacgacgaatgatggcgtcacgaccatcgctaataaccttaccagcacggttcaagtcttctcggactcggagtaccagttgccgtacgtcctcggctctgcgcaccagggctgcctccctccgttcccggcggacgtgttcatgattccgcagtacggctacctaacgctcaacaatggcagccaagccgtgggacgttcatccttttactgcctggaatatttcccttctcagatgctgagaacgggcaacaactttaccttcagctacacttttgaggacgttcctttccacagcagctacgctcacagccagagtctggaccgtctcatgaatcccctcatcgaccagtacctgtattacttgagcagaacaaacactccaagtggaaccaccacgcagtcaaggcttcagttttctcaggccggagcgagtgacattcgggaccagtctaggaactggcttcctggaccctgttaccggcagcagcgcgtttctaaaacaaaaacagacaacaacaacagcaactttacctggactggtgcttcaaaatataaccttaatgggcgtgaatctataatcaaccctggcactgctatggcctcacacaaagacgacgaagacaagttctttcccatgagcggtgtcatgatttttggaaaggagagcgccggagcttcaaacactgcattggacaatgtcatgatcacagacgaagaggaaatcaaagccactaaccccgtggccaccgaaagatttgggactgtggcagtcaatctccagagcagcagcacagaccctgcgaccggagatgtgcatgttatgggagccttacctggaatggtgtggcaagacagagacgtgtacctgcagggtcctatttgggccaaaattcctcacacggatggacactttcacccgtctcctctcatgggcggctttggacttaagcacccgcctcctcagatcctcatcaaaaacacgcctgttcctgcgaatcctccggcagagttttcggctacaaagtttgcttcattcatcacccagtattccacaggacaagtgagtgtggaaattgaatgggagctgcagaaagaaaacagcaagcgctggaatcccgaagtgcagtacacatccaattatgcaaaatctgccaacgttgattttactgtggacaacaatggactttatactgagcctcgccccattggcacccgttacctcacccgtcccctgtaa

SEQ ID NO: 346 - protein, 736 aa, Artificial Sequence
  source: /note="Description of Artificial Sequence: Synthetic polypeptide"
MAADGYLPDWLEDNLSEGIREWWDLKPGAPKPKANQQHQDNARGLVLPGYKYLGPGNGLDKGEPVNAADAAALEHDKAYDQQLKAGDNPYLKYNHADAEFQERLKEDTSFGGNLGRAVFQAKKRLLEPLGLVEEAAKTAPGKKRPVEPSPQRSPDSSTGIGKKGQQPAKKRLNFGQTGDSESVPDPQPLGEPPATPAAVGPTTMASGGGAPMADNNEGADGVGNSSGNWHCDSQWLGDRVITTSTRTWALPTYNNHLYKQISSQSGASNDNHYFGYSTPWGYFDFNRFHCHFSPRDWQRLINNNWGFRPKRLNFKLFNIQVKEVTTNDGVTTIANNLTSTVQVFSDSEYQLPYVLGSAHQGCLPPFPADVFMIPQYGYLTLNNGSQAVGRSSFYCLEYFPSQMLRTGNNFTFSYTFEDVPFHSSYAHSQSLDRLMNPLIDQYLYYLSRTNTPSGTTTQSRLQFSQAGASDIRDQSRNWLPGPCYRQQRVSKTKTDNNNSNFTWTGASKYNLNGRESIINPGTAMASHKDDEDKFFPMSGVMIFGKESAGASNTALDNVMITDEEEIKATNPVATERFGTVAVNLQSSSTDPATGDVHVMGALPGMVWQDRDVYLQGPIWAKIPHTDGHFHPSPLMGGFGLKHPPPQILIKNTPVPANPPAEFSATKFASFITQYSTGQVSVEIEWELQKENSKRWNPEVQYTSNYAKSANVDFTVDNNGLYTEPRPIGTRYLTRPL

SEQ ID NO: 347 - DNA, 2214 bp, Artificial Sequence
  source: /note="Description of Artificial Sequence: Synthetic polynucleotide"
atggctgccgatggttatcttccagattggctcgaggacaaccttagtgaaggaattcgcgagtggtgggctttgaaacctggagcccctcaacccaaggcaaatcaacaacatcaagacaacgctcgaggtcttgtgcttccgggttacaaataccttggacccggcaacggactcgacaagggggagccggtcaacgcagcagacgcggcggccctcgagcacgacaaggcctacgaccagcagctgcaggcgggtgacaatccgtacctgcggtataaccacgccgacgccgagtttcaggagcgtctgcaagaagatacgtcttttgggggcaaccttggcagagcagtcttccaggccaaaaagaggatccttgagcctcttggtctggttgaggaagcagctaaaacggctcctggaaagaagaggcctgtagatcagtctcctcaggaaccggactcatcatctggtgttggcaaatcgggcaaacagcctgccagaaaaagactaaatttcggtcagactggcgactcagagtcagtcccagaccctcaacctctcggagaaccaccagcagcccccacaagtttgggatctaatacaatggcttcaggcggtggcgcaccaatggcagacaataacgagggtgccgatggggtgggtagttcctcgggaaattggcattgcgattcccaatgactgggggacagagtcatcaccaccagcacccgaacctgggccctgcccacctacaacaatcacctctacaagcaaatctccaacgggacatcgggaggagccaccaacgacaacacctacttcggctacagcaccccctgggggtattttgactttaacagattccactgccacttttcaccacgtgactggcagcgactcatcaacaacaactggggattccggcccaagagactcagcttcaagctcttcaacatccaggtcaaggaggtcacgcagaatgaaggcaccaagaccatcgccaataacctcaccagcaccatccaggtgtttacggactcggagtaccagctgccgtacgttctcggctctgcgcaccagggctgcctccctccgttcccggcggacgtgttcatgattccgcaatacggctacctgacgctcaacaatggcagccaagccgtgggacgttcatccttttactgcctggaatatttcccttctcagatgctgagaacgggcaacaactttaccttcagctacacctttgaggaagtgcctttccacagcagctacgcgcacagccagagcttggaccggctgatgaatcctctgattgaccagtacctgtactacttgtctcggactcaaacaacaggaggcacggcaaatacgcagactctgggcttcagccaaggtgggcctaatacaatggccaatcaggcaaagaactggctgccaggaccctgttaccgccaacaacgcgtctcaacgacaaccgggcaaaacaacaatagcaactttgcctggactgctgggaccaaataccatctgaatggaagaaattcattggctaatcctggcatcgctatggcaacacacaaagacgacgaggagcgtttttttcccagtaacgggatcctgatttttggcaaacaaaatgctgccagagacaatgcggattacagcgatgtcatgctcaccagcgaggaagaaatcaaaaccactaaccctgtggctacagaggaatacggtatcgtggcagataacttgcagcagcaaaacacggctcctcaaattggaactgtcaacagccagggggccttacccggtatggtctggcagaaccgggacgtgtacctgcagggtcccatctgggccaagattcctcacacggacggcaacttccacccgtctccgctgatgggcggctttggcctgaaacatcctccgcctcagatcctgatcaagaacacgcctgtacctgcggatcctccgaccaccttcaaccagtcaaagctgaactctttcatcacgcaatacagcaccggacaggtcagcgtggagatcgagtgggagctgcagaaggaaaacagcaagcgctggaacccggagatccagtacacttccaactattacaagtctaataatgttgaatttgctgttaatactgaaggtgtatatagtgaaccccgccccattggcaccagatacctgactcgtaatctgtaa

SEQ ID NO: 348 - protein, 736 aa, Artificial Sequence
  source: /note="Description of Artificial Sequence: Synthetic polypeptide"
MAADGYLPDWLEDNLSEGIREWWALKPGAPQPKANQQHQDNARGLVLPGYKYLGPGNGLDKGEPVNAADAAALEHDKAYDQQLQAGDNPYLRYNHADAEFQERLQEDTSFGGNLGRAVFQAKKRILEPLGLVEEAAKTAPGKKRPVDQSPQEPDSSSGVGKSGKQPARKRLNFGQTGDSESVPDPQPLGEPPAAPTSLGSNTMASGGGAPMADNNEGADGVGSSSGNWHCDSQLGDRVITTSTRTWALPTYNNHLYKQISNGTSGGATNDNTYFGYSTPWGYFDFNRFHCHFSPRDWQRLINNNWGFRPKRLSFKLFNIQVKEVTQNEGTKTIANNLTSTIQVFTDSEYQLPYVLGSAHQGCLPPFPADVFMIPQYGYLTLNNGSQAVGRSSFYCLEYFPSQMLRTGNNFTFSYTFEEVPFHSSYAHSQSLDRLMNPLIDQYLYYLSRTQTTGGTANTQTLGFSQGGPNTMANQAKNWLPGPCYRQQRVSTTTGQNNNSNFAWTAGTKYHLNGRNSLANPGIAMATHKDDEERFFPSNGILIFGKQNAARDNADYSDVMLTSEEEIKTTNPVATEEYGIVADNLQQQNTAPQIGTVNSQGALPGMVWQNRDVYLQGPIWAKIPHTDGNFHPSPLMGGFGLKHPPPQILIKNTPVPADPPTTFNQSKLNSFITQYSTGQVSVEIEWELQKENSKRWNPEIQYTSNYYKSNNVEFAVNTEGVYSEPRPIGTRYLTRNL

SEQ ID NO: 349 - DNA, 2214 bp, Artificial Sequence
  source: /note="Description of Artificial Sequence: Synthetic polynucleotide"
atggctgccgatggttatcttccagattggctcgaggacaaccttagtgaaggaattcgcgagtggtgggctttgaaacctggagcccctcaacccaaggcaaatcaacaacatcaagacaacgctcgaggtcttgtgcttccgggttacaaataccttggacccggcaacggactcgacaagggggagccggtcaacgcagcagacgcggcggccctcgagcacgacaaggcctacgaccagcagctgcaggcgggtgacaatccgtacctgcggtataaccacgccgacgccgagtttcaggagcgtctgcaagaagatacgtcttttgggggcaaccttggcagagcagtcttccaggccaaaaagaggatccttgagcctcttggtctggttgaggaagcagctaaaacggctcctggaaagaagaggcctgtagatcagtctcctcaggaaccggactcatcatctggtgttggcaaatcgggcaaacagcctgccagaaaaagactaaatttcggtcagactggcgactcagagtcagtcccagaccctcaacctctcggagaaccaccagcagcccccacaagtttgggatctaatacaatggcttcaggcggtggcgcaccaatggcagacaataacgagggtgccgatggggtgggtagttcctcgggaaattggcattgcgattcccaatggctgggggacagagtcatcaccaccagcacccgaacctgggccctgcccacctacaacaatcacctctacaagcaaatctccaacgggacatcgggaggagccaccaacgacaacacctacttcggctacagcaccccctgggggtattttgactttaacagattccactgccacttttcaccacgtgactggcagcgactcatcaacaacaactggggattccggcccaagagactcagcttcaagctcttcaacatccaggtcaaggaggtcacgcagaatgaaggcaccaagaccatcgccaataacctcaccagcaccatccaggtgtttacggactcggagtaccagctgccgtacgttctcggctctgcgcaccagggctgcctccctccgttcccggcggacgtgttcatgattccgcaatacggctacctgacgctcaacaatggcagccaagccgtgggacgttcatccttttactgcctggaatatttcccttctcagatgctgagaacgggcaacaactttaccttcagctacacctttgaggaagtgccttttcacagcagctacgcgcacagccagagcttggaccggctgatgaatcctctgattgaccagtacctgtactacttgtctcggactcaaacaacaggaggcacggcaaatacgcagactctgggcttcagccaaggtgggcctaatacaatggccaatcaggcaaagaactggctgccaggaccctgttaccgccaacaacgcgtctcaacgacaaccgggcaaaacaacaatagcaactttgcctggactgctgggaccaaataccatctgaatggaagaaattcattggctaatcctggcatcgctatggcaacacacaaagacgacgaggagcgtttttttcccagtaacgggatcctgatttttggcaaacaaaatgctgccagagacaatgcggattacagcgatgtcatgctcaccagcgaggaagaaatcaaaaccactaaccctgtggctacagaggaatacggtatcgtggcagataacttgcagcagcaaaacacggctcctcaaattggaactgtcaacagccagggggccttacccggtatggtctggcagaaccgggacgtgtacctgcagggtcccatctgggccaagattcctcacacggacggcaacttccacccgtctccgctgatgggcggctttggcctgaaacatcctccgcctcagatcctgatcaagaacacgcctgtacctgcggatcctccgaccaccttcaaccagtcaaagctgaactctttcatcacgcaatacagcaccggacaggtcagcgtggagatcgagtgggagctgcagaaggaaaacagcaagcgctggaacccggagatccagtacacttccaactattacaagtctaataatgttgaatttgctgttaatactgaaggtgtatatagtgaaccccgccccattggcaccagatacctgactcgtaatctgtaa

SEQ ID NO: 350 - protein, 737 aa, Artificial Sequence; identical to SEQ ID NO: 338
  source: /note="Description of Artificial Sequence: Synthetic polypeptide"

SEQ ID NO: 351 - DNA, 2211 bp, Artificial Sequence
  source: /note="Description of Artificial Sequence: Synthetic polynucleotide"
atggctgccgatggttatcttccagattggctcgaggacaacctctctgagggcattcgcgagtggtgggacttgaaacctggagcccctaaacccaaggcaaatcaacaacatcaggacaacgctcgaggtcttgtgcttccgggttacaaataccttggacccggcaacggactcgacaagggggagccggtcaacgcagcagacgcggcggccctcgagcacgacaaggcctacgaccagcagctcaaggccggagacaacccgtacctcaagtacaaccacgccgacgccgagttccaggagcggctcaaagaagatacgtcttttgggggcaacctcgggcgagcagtcttccaggccaaaaagaggcttcttgaacctcttggtctggttgaggaagcggctaagacggctcctggaaagaagagaccggtagagccatcaccccagcgttctccagactcctctacgggcatcggcaagaaaggccaacagcccgctaaaaagagactcaattttggtcagactggcgactcagagtcagtccccgacccacaacctctcggagaacctccagcaacccccgctgctgtgggacctactacaatggcttcaggcggtggcgcaccaatggcagacaataacgagggtgccgatggagtgggtaattcctcaggaaattggcattgcgattcccaatggctgggcgacagagtcatcaccaccagcaccagaacctgggccctgcccacttacaacaaccatctctacaagcaaatctccagccaatcaggagcttcaaacgacaaccactactttggctacagcaccccttgggggtattttgactttaacagattccactgccacttttcaccacgtgactggcaaagactcatcaacaacaactggggattccgacccaagagactcaacttcaagctcttcaacatccaagtcaaggaggtcacgacgaatgatggcgtcacgaccatcgctaataaccttaccagcacggttcaagtcttctcggactcggagtaccagttgccgtacgtcctcggctctgcgcaccagggctgcctccctccgttcccggcggacgtgttcatgattccgcagtacggctacctaacgctcaacaatggcagccaagccgtgggacgttcatccttttactgcctggaatatttcccttctcagatgctgagaacgggcaacaactttaccttcagctacacttttgaggacgttcctttccacagcagctacgctcacagccagagtctggaccgtctcatgaatcctctcatcgaccagtacctgtattacttgagcagaacaaacactccaagtggaaccaccacgcagtcaaggcttcagttttctcaggccggagcgagtgacattcgggaccagtctaggaactggcttcctggaccctgttaccgccagcagcgcgtttctaaaacaaaaacagacaacaacaacagcaattttacctggactggtgcttcaaaatataaccttaatgggcgtgaatctataatcaaccctggcactgctatggcctcacacaaagacgacgaagacaagttctttcccatgagcggtgtcatgatttttggaaaagagagcgccggagcttcaaacactgcattggacaatgtcatgattacagacgaagaggaaattaaagccactaaccctgtggccaccgaaagatttgggaccgtggcagtcaatttccagagcagcagcacagaccctgcgaccggagatgtgcatgctatgggagcattacctggcatggtgtggcaagatagagacgtgtacctgcagggtcccatttgggccaaaattcctcacacagatggacactttcacccgtctcctcttatgggcggctttggactcaagaacccgcctcctcagatcctcatcaaaaacacgcctgttcctgcgaatcctccggcggagttttcagctacaaagtttgcttcattcatcacccaatactccacaggacaagtgagtgtggaaattgaatgggagctgcagaaagaaaacagcaagcgctggaatcccgaagtgcagtacacatccaattatgcaaaatctgccaacgttgattttactgtggacaacaatggactttatactgagcctcgccccattggcacccgttaccttacccgtcccctgtaa

SEQ ID NO: 352 - protein, 736 aa, Artificial Sequence
  source: /note="Description of Artificial Sequence: Synthetic polypeptide"
MAADGYLPDWLEDNLSEGIREWWDLKPGAPKPKANQQHQDNARGLVLPGYKYLGPGNGLDKGEPVNAADAAALEHDKAYDQQLKAGDNPYLKYNHADAEFQERLKEDTSFGGNLGRAVFQAKKRLLEPLGLVEEAAKTAPGKKRPVEPSPQRSPDSSTGIGKKGQQPAKKRLNFGQTGDSESVPDPQPLGEPPATPAAVGPTTMASGGGAPMADNNEGADGVGNSSGNWHCDSQWLGDRVITTSTRTWALPTYNNHLYKQISSQSGASNDNHYFGYSTPWGYFDFNRFHCHFSPRDWQRLINNNWGFRPKRLNFKLFNIQVKEVTTNDGVTTIANNLTSTVQVFSDSEYQLPYVLGSAHQGCLPPFPADVFMIPQYGYLTLNNGSQAVGRSSFYCLEYFPSQMLRTGNNFTFSYTFEDVPFHSSYAHSQSLDRLMNPLIDQYLYYLSRTNTPSGTTTQSRLQFSQAGASDIRDQSRNWLPGPCYRQQRVSKTKTDNNNSNFTWTGASKYNLNGRESIINPGTAMASHKDDEDKFFPMSGVMIFGKESAGASNTALDNVMITDEEEIKATNPVATERFGTVAVNFQSSSTDPATGDVHAMGALPGMVWQDRDVYLQGPIWAKIPHTDGHFHPSPLMGGFGLKNPPPQILIKNTPVPANPPAEFSATKFASFITQYSTGQVSVEIEWELQKENSKRWNPEVQYTSNYAKSANVDFTVDNNGLYTEPRPIGTRYLTRPL

SEQ ID NO: 353 - DNA, 2211 bp, Artificial Sequence
  source: /note="Description of Artificial Sequence: Synthetic polynucleotide"
atggctgccgatggttatcttccagattggctcgaggacaaccttagtgaaggaattcgcgagtggtgggcgctgaaacctggagccccgaagcccaaagccaaccagcaaaagcaggacgacggccggggtctggtgcttccgggttacaaatacctcggacccggtaacggactcgacaaaggagagccggtcaacgaggcggacgcggcagccctcgagcacgacaaggcctacgaccagcagctcaaagcgggtgacaatccgtacctgcggtataaccacgccgacgccgagtttcaggagcgtctgcaagaagatacgtcttttgggggcaacctcgggcgagcagtcttccaggccaagaagcgggttctcgaacctctcggtctggttgaggaaggcgctaagacggctcccggaaagaaacgtccggtagagcagtcgccacaagagccagactcctctacgggcatcggcaagaaaggccaacagcccgccagaaaaagactcaatttcggtcagactggcgactcagagtcagttccagaccctcaacctctcggagaacctccagcagcgccctctggtgtgggacctactacaatggcttcaggcggtggcgcaccaatggcagacaataacgaaggcgccgacggagtgggtaatgcctcaggaaattggcattgcgattccacatggctgggcgacagagtcatcaccaccagcacccgaacatgggccttgcccacctataacaaccacctctacaagcaaatctccagtgcttcaacgggggccagcaacgacaacacctacttcggctacagcaccccctgggggtattttgatttcaacagattccactgccatttctcaccacgtgactggcagcgactcatcaacaacaattggggattccggcccaagagactcaacttcaaactcttcaacatccaagtcaaggaggtcacgacgaatgatggcgtcacgaccatcgctaataaccttaccagcacggttcaagtcttctcggactcggagtaccagttgccgtacgtcctcggctctgcgcaccagggctgcctccctccgttcccggcggacgtgttcatgattccgcagtacggctacctaacgctcaacaatggcagccaggcagtgggacggtcatccttttactgcctggaatatttcccatcgcagatgctgagaacgggcaataactttaccttcagctacaccttcgaggacgtgcctttccacagcagctacgcgcacagccagagcctggaccggctgatgaatcctctcatcgaccagtacctgtattacctgaacagaactcagaatcagtccggaagtgcccaaaacaaggacttgctgtttagccgggggtctccagctggcatgtctgttcagcccaaaaactggctacctggaccctgttatcggcagcagcgcgtttctaaaacaaaaacagacaacaacaacagcaattttacctggactggtgcttcaaaatataacctcaatgggcgtgaatccatcatcaaccctggcactgctatggcctcacacaaagacgacgaagacaagttctttcccatgagcggtgtcatgatttttggaaaagagagcgccggagcttcaaacactgcattggacaatgtcatgattacagacgaagaggaaattaaagccactaaccctgtggccaccgaaagatttgggaccgtggcagtcaatttccagagcagcagcacagaccctgcgaccggagatgtgcatgttatgggagccttacctggaatggtgtggcaagacagagacgtatacctgcagggtcctatttgggccaaaattcctcacacagatggacactttcacccgtctcctcttatgggcggctttggactcaagaacccgcctcctcagatcctcatcaaaaacacgcctgttcctgcgaatcctccggcagagttttcggctacaaagtttgcttcattcatcacccagtattccacaggacaagtgagcgtggagattgaatgggagctgcagaaagaaaacagcaaacgctggaatcccgaagtgcagtatacatctaactatgcaaaatctgccaacgttgatttcactgtggacaacaatggactttatactgagcctcgccccattggcacccgttacctcacccgtcccctgtaa

SEQ ID NO: 354 - protein, 736 aa, Artificial Sequence
  source: /note="Description of Artificial Sequence: Synthetic polypeptide"
MAADGYLPDWLEDNLSEGIREWWALKPGAPKPKANQQKQDDGRGLVLPGYKYLGPGNGLDKGEPVNEADAAALEHDKAYDQQLKAGDNPYLRYNHADAEFQERLQEDTSFGGNLGRAVFQAKKRVLEPLGLVEEGAKTAPGKKRPVEQSPQEPDSSTGIGKKGQQPARKRLNFGQTGDSESVPDPQPLGEPPAAPSGVGPTTMASGGGAPMADNNEGADGVGNASGNWHCDSTWLGDRVITTSTRTWALPTYNNHLYKQISSASTGASNDNTYFGYSTPWGYFDFNRFHCHFSPRDWQRLINNNWGFRPKRLNFKLFNIQVKEVTTNDGVTTIANNLTSTVQVFSDSEYQLPYVLGSAHQGCLPPFPADVFMIPQYGYLTLNNGSQAVGRSSFYCLEYFPSQMLRTGNNFTFSYTFEDVPFHSSYAHSQSLDRLMNPLIDQYLYYLNRTQNQSGSAQNKDLLFSRGSPAGMSVQPKNWLPGPCYRQQRVSKTKTDNNNSNFTWTGASKYNLNGRESIINPGTAMASHKDDEDKFFPMSGVMIFGKESAGASNTALDNVMITDEEEIKATNPVATERFGTVAVNFQSSSTDPATGDVHVMGALPGMVWQDRDVYLQGPIWAKIPHTDGHFHPSPLMGGFGLKNPPPQILIKNTPVPANPPAEFSATKFASFITQYSTGQVSVEIEWELQKENSKRWNPEVQYTSNYAKSANVDFTVDNNGLYTEPRPIGTRYLTRPL

SEQ ID NO: 355 - DNA, 2205 bp, Artificial Sequence
  source: /note="Description of Artificial Sequence: Synthetic polynucleotide"
atggctgctgacggttatcttccagattggctcgaggacaacctttctgaaggcattcgtgagtggtgggctctgaaacctggagtccctcaacccaaagcgaaccaacaacaccaggacaaccgtcggggtcttgtgcttccgggttacaaatacctcggacccggtaacggactcgacaaaggagagccggtcaacgaggcggacgcggcagccctcgaacacgacaaggcctacgaccagcagctcaaggccggagacaacccgtacctcaagtacaaccacgccgacgccgagttccaggagcggctcaaagaagatacgtcttttgggggcaacctcgggcgagcagtcttccaggccaaaaagaggcttcttgaacctcttggtctggttgaggaagcggctaagacggctcctggaaagaagaggcctgtagagcagtctcctcaggaaccggactcctccgcgggtattggcaaatcgggtgcacagcccgctaaaaagagactcaatttcggtcagactggcgacacagagtcagtcccagaccctcaaccaatcggagaacctcccgcagccccctcaggtgtgggatctcttacaatggcttcaggtggtggcgcaccagtggcagacaataacgaaggtgccgatggagtgggtagttcctcgggaaattggcattgcgattcccaatggctgggggacagagtcatcaccaccagcacccgaacctgggccctgcccacctacaacaaccacctctacaaacaaatttccagccaatcaggagcctcgaacgacaatcactactttggctacagcaccccttgggggtattttgacttcaacagattccactgccacttttcaccacgtgactggcagcgactcatcaacaacaactggggattccggcccaagagactcagcttcaagctcttcaacatccaggtcaaagaggttacggacaacaatggagtcaagaccatcgccaataaccttaccagcacggtccaggtcttcacggactcagactatcagctcccgtacgtgctcgggtcggctcacgagggctgcctcccgccgttcccagcggacgttttcatgattcctcagtacgggtatctgacgcttaatgatggaagccaggccgtgggtcgttcgtccttttactgcctggaatatttcccgtcgcaaatgctaagaacgggtaacaacttccagttcagctacgagtttgagaacgtacctttccatagcagctacgctcacagccaaagcctggaccgactaatgaatccactcatcgaccaatacttgtactatctctcaaagactattaacggttctggacagaatcaacaaacgctaaaattcagtgtggccggacccagcaacatggctgtccagggaagaaactacatacctggacccagctaccgacaacaacgtgtctcaaccactgtgactcaaaacaacaacagcgaatttgcttggcctggagcttcttcttgggctctcaatggacgtaatagcttgatgaatcctggacctgctatggccagccacaaagaaggagaggaccgtttctttcctttgtctggatctttaatttttggcaaacaaggaactggaagagacaacgtggatgcggacaaagtcatgataaccaacgaagaagaaattaaaactactaacccggtagcaacggagtcctatggacaagtggccacaaaccaccagagtgcccaagcacaggcgcagaccggctgggttcaaaaccaaggaatacttccgggtatggtttggcaggacagagatgtgtacctgcaaggacccatctgggccaagattcctcacacggacggcaacttccacccgtctccgctgatgggcggctttggcctgaaacatcctccgcctcagatcctgatcaagaacacgcctgtacctgcggatcctccgaccaccttcaaccagtcaaagctgaactctttcatcacgcaatacagcaccggacaggtcagcgtggaaattgaatgggagctgcagaaggaaaacagcaagcgctggaatcccgaagtgcagtatacatctaactatgcaaaatctgccaacgttgatttcactgtggacaacaatggactttatactgagcctcgccccattggcacccgttacctcacccgtcccctgtaa

SEQ ID NO: 356 - protein, 734 aa, Artificial Sequence
  source: /note="Description of Artificial Sequence: Synthetic polypeptide"
MAADGYLPDWLEDNLSEGIREWWALKPGVPQPKANQQHQDNRRGLVLPGYKYLGPGNGLDKGEPVNEADAAALEHDKAYDQQLKAGDNPYLKYNHADAEFQERLKEDTSFGGNLGRAVFQAKKRLLEPLGLVEEAAKTAPGKKRPVEQSPQEPDSSAGIGKSGAQPAKKRLNFGQTGDTESVPDPQPIGEPPAAPSGVGSLTMASGGGAPVADNNEGADGVGSSSGNWHCDSQWLGDRVITTSTRTWALPTYNNHLYKQISSQSGASNDNHYFGYSTPWGYFDFNRFHCHFSPRDWQRLINNNWGFRPKRLSFKLFNIQVKEVTDNNGVKTIANNLTSTVQVFTDSDYQLPYVLGSAHEGCLPPFPADVFMIPQYGYLTLNDGSQAVGRSSFYCLEYFPSQMLRTGNNFQFSYEFENVPFHSSYAHSQSLDRLMNPLIDQYLYYLSKTINGSGQNQQTLKFSVAGPSNMAVQGRNYIPGPSYRQQRVSTTVTQNNNSEFAWPGASSWALNGRNSLMNPGPAMASHKEGEDRFFPLSGSLIFGKQGTGRDNVDADKVMITNEEEIKTTNPVATESYGQVATNHQSAQAQAQTGWVQNQGILPGMVWQDRDVYLQGPIWAKIPHTDGNFHPSPLMGGFGLKHPPPQILIKNTPVPADPPTTFNQSKLNSFITQYSTGQVSVEIEWELQKENSKRWNPEVQYTSNYAKSANVDFTVDNNGLYTEPRPIGTRYLTRPL

SEQ ID NO: 357 - DNA, 2211 bp, Artificial Sequence
  source: /note="Description of Artificial Sequence: Synthetic polynucleotide"
atggctgccgatggttatcttccagattggctcgaggacaacctctctgagggcattcgcgagtggtgggcgctgaaacctggagccccgaagcccaaagccaaccagcaaaagcaggacgacggccggggtctggtgcttcctggctacaagtacctcggacccttcaacggactcgacaagggggagcccgtcaacgcggcggacgcagcggccctcgagcacgacaaggcctacgaccagcagctgcaggcgggtgacaatccgtacctgcggtataaccacgccgacgccgagtttcaggagcgtctgcaagaagatacgtcttttgggggcaacctcgggcgagcagtcttccaggccaagaagtgggttctcgaacctctcggtctggttgaggaaggcgctaagacggctcctggaaagaaacgtccggtagagcagtcgccacaagagccagactcctcctcgggcatcggcaagacaggccagcagcccgctaaaaagagactcaattttggtcagactggcgactcagagtcagtccccgacccacaacctctcggagaacctccagcaacccccgctgctgtgggacctactacaatggcttcaggcggtggcgcaccaatggcagacaataacgaaggcgccgacggagtgggtaatgcctcaggaaattggcattgcgattccacatggctgggcgacagagtcatcaccaccagcacccgcacctgggccttgcccacctacaataaccacctctacaagcaaatctccagtgcttcaacgggggccagcaacgacaaccactacttcggctacagcaccccctgggggtattttgatttcaacagattccactgccatttctcaccacgtgactggcagcgactcatcaacaacaattggggattccggcccaagagactcaacttcaagctcttcaacatccaagtcaaggaggtcacgacgaatgatggcgtcacaaccatcgctaataaccttaccagcacggttcaagtcttctcggactcggagtaccagcttccgtacgtcctcggctctgcgcaccagggctgcctccctccgttcccggcggacgtgttcatgattccgcaatacggctacctgacgctcaacaatggcagccaagccgtgggacgttcatccttttactgcctggaatatttcccttctcagatgctgagaacgggcaacaactttaccttcagctacacctttgaggaagtgcctttccacagcagctacgcgcacagccagagcctggaccggctgatgaatcctctcatcgaccaatacctgtattacctgaacagaactcaaaatcagtccggaagtgcccaaaacaaggacttgctgtttagccgtgggtctccagctggcatgtctgttcagcccaaaaactggctacctggaccctgttatcggcagcagcgcgtttctaaaacaaaaacagacaacaacaacagcaattttacctggactggtgcttcaaaatataacctcaatgggcgtgaatccatcatcaaccctggcactgctatggcctcacacaaagacgacgaagacaagttctttcccatgagcggtgtcatgatttttggaaaggagagcgccggagcttcaaacactgcattggacaatgtcatgatcaccgacgaagaggaaatcaaagccactaaccccgtggccaccgaaagatttgggactgtggcagtcaatctccagagcagcagcacagaccctgcgaccggagatgtgcatgttatgggagccttacctggcatggtgtggcaagatagagacgtgtacctgcagggtcccatttgggccaaaattcctcacacagatggacactttcacccgtctcctcttatgggcggctttggactcaagaacccgcctcctcagatcctcatcaaaaacacgcctgttcctgcgaatcctccggcggagttttcagctacaaagtttgcttcattcatcacccaatactccacaggacaagtgagtgtggaaattgaatgggagctgcagaaagaaaacagcaagcgctggaatcccgaagtgcagtacacatccaattatgcaaaatctgccaacgttgattttactgtggacaacaatggactttatactgagcctcgccccattggcacccgttacctcacccgtcccctgtaa

SEQ ID NO: 358 - protein, 736 aa, Artificial Sequence
  source: /note="Description of Artificial Sequence: Synthetic polypeptide"
MAADGYLPDWLEDNLSEGIREWWALKPGAPKPKANQQKQDDGRGLVLPGYKYLGPFNGLDKGEPVNAADAAALEHDKAYDQQLQAGDNPYLRYNHADAEFQERLQEDTSFGGNLGRAVFQAKKWVLEPLGLVEEGAKTAPGKKRPVEQSPQEPDSSSGIGKTGQQPAKKRLNFGQTGDSESVPDPQPLGEPPATPAAVGPTTMASGGGAPMADNNEGADGVGNASGNWHCDSTWLGDRVITTSTRTWALPTYNNHLYKQISSASTGASNDNHYFGYSTPWGYFDFNRFHCHFSPRDWQRLINNNWGFRPKRLNFKLFNIQVKEVTTNDGVTTIANNLTSTVQVFSDSEYQLPYVLGSAHQGCLPPFPADVFMIPQYGYLTLNNGSQAVGRSSFYCLEYFPSQMLRTGNNFTFSYTFEEVPFHSSYAHSQSLDRLMNPLIDQYLYYLNRTQNQSGSAQNKDLLFSRGSPAGMSVQPKNWLPGPCYRQQRVSKTKTDNNNSNFTWTGASKYNLNGRESIINPGTAMASHKDDEDKFFPMSGVMIFGKESAGASNTALDNVMITDEEEIKATNPVATERFGTVAVNLQSSSTDPATGDVHVMGALPGMVWQDRDVYLQGPIWAKIPHTDGHFHPSPLMGGFGLKNPPPQILIKNTPVPANPPAEFSATKFASFITQYSTGQVSVEIEWELQKENSKRWNPEVQYTSNYAKSANVDFTVDNNGLYTEPRPIGTRYLTRPL

SEQ ID NO: 359 - DNA, 2214 bp, Artificial Sequence
  source: /note="Description of Artificial Sequence: Synthetic polynucleotide"
atggctgccgatggttatcttccagattggctcgaggacaaccttagtgaaggaattcgcgagtggtgggctttgaaacctggagcccctcaacccaaggcaaatcaacaacatcaagacaacgctcgaggtcttgtgcttccgggttacaaataccttggacccggcaacggactcgacaagggggagccggtcaacgcagcagacgcggcggccctcgagcacgacaaggcctacgaccagcagctgcaggcgggtgacaatccgtacctgcggtataaccacgccgacgccgagtttcaggagcgtctgcaagaagatacgtcttttgggggcaaccttggcagagcagtcttccaggccaaaaagaggatccttgagcctcttggtctggttgaggaagcagctaaaacggctcctggaaagaagaggcctgtagatcagtctcctcaggaaccggactcatcatctggtgttggcaaatcgggcaaacagcctgccagaaaaagactaaatttcggtcagactggcgactcagagtcagtcccagaccctcaacctctcggagaaccaccagcagcccccacaagtttgggatctaatacaatggcttcaggcggtggcgcaccaatggcagacaataacgagggtgccgatggggtgggtagttcctcgggaaattggcattgcgattcccaatggctgggggacagagtcatcaccaccagcacccgaacctgggccctgcccacctacaacaatcacctctacaagcaaatctccaacgggacatcgggaggagccaccaacgacaacacctacttcggctacagcaccccctgggggtattttgactttaacagattccactgccacttttcaccacgtgactggcagcgactcatcaacaacaactggggattccggcccaagagactcagcttcaagctcttcaacatccaggtcaaggaggtcacgcagaatgaaggcaccaagaccatcgccaataacctcaccagcaccatccaggtgtttacggactcggagtaccagctgccgtacgttctcggctcggcgcaccagggctgcctccctccgttcccggcggacgtcttcatggtgccacagtatggatacctgacgctcaacaatggcagccaagccgtgggacgttcatccttttactgcctggaatatttcccttctcagatgctgagaacgggcaacaactttaccttcagctacacctttgaggaagtgcctttccacagcagctacgcgcacagccagagcttggaccggctgatgaatcctctgattgaccagtacctgtactacttgtctcggactcaaacaacaggaggcacggcaaatacgcagactctgggcttcagccaaggtgggcctaatacaatggccaatcaggcaaagaactggctgccaggaccctgttaccgccaacaacgcgtctcaacgacaaccgggcaaaacaacaatagcaactttgcctggactgctgggaccaaataccatctgaatggaagaaattcattggctaatcctggcatcgctatggcaacacacaaagacgacgaggagcgtttttttcccagtaacgggatcctgatttttggcaaacaaaatgctgccagagacaatgcggattacagcgatgtcatgctcaccagcgaggaagaaatcaaaaccactaaccctgtggctacagaggaatacggtatcgtggcagataacttgcagcagcaaaacacggctcctcaaattggaactgtcaacagccagggggacttacccggtatggtctggcagaaccgggacgtgtacctgcagggtcccatctgggccaagattcctcacacggacggcaacttccacccgtctccgctgatgggcggctttggcctgaaacatcctccgcctcagatcctgatcaagaacacgcctgtacctgcggatcctccgaccaccttcaaccagtcaaagctgaactctttcatcacgcaatacagcaccggacaggtcagcgtggagatcgagtgggagctgcagaaggaaaacagcaagcgctggaacccggagatccagtacacttccaactattacaagtctaataatgttgaatttgctgttaatactgaaggtgtatatagtgaaccccgccccattggcaccagatacctgactcgtaatctgtaa

SEQ ID NO: 360 - protein, 737 aa, Artificial Sequence
  source: /note="Description of Artificial Sequence: Synthetic polypeptide"
MAADGYLPDWLEDNLSEGIREWWALKPGAPQPKANQQHQDNARGLVLPGYKYLGPGNGLDKGEPVNAADAAALEHDKAYDQQLQAGDNPYLRYNHADAEFQERLQEDTSFGGNLGRAVFQAKKRILEPLGLVEEAAKTAPGKKRPVDQSPQEPDSSSGVGKSGKQPARKRLNFGQTGDSESVPDPQPLGEPPAAPTSLGSNTMASGGGAPMADNNEGADGVGSSSGNWHCDSQWLGDRVITTSTRTWALPTYNNHLYKQISNGTSGGATNDNTYFGYSTPWGYFDFNRFHCHFSPRDWQRLINNNWGFRPKRLSFKLFNIQVKEVTQNEGTKTIANNLTSTIQVFTDSEYQLPYVLGSAHQGCLPPFPADVFMVPQYGYLTLNNGSQAVGRSSFYCLEYFPSQMLRTGNNFTFSYTFEEVPFHSSYAHSQSLDRLMNPLIDQYLYYLSRTQTTGGTANTQTLGFSQGGPNTMANQAKNWLPGPCYRQQRVSTTTGQNNNSNFAWTAGTKYHLNGRNSLANPGIAMATHKDDEERFFPSNGILIFGKQNAARDNADYSDVMLTSEEEIKTTNPVATEEYGIVADNLQQQNTAPQIGTVNSQGDLPGMVWQNRDVYLQGPIWAKIPHTDGNFHPSPLMGGFGLKHPPPQILIKNTPVPADPPTTFNQSKLNSFITQYSTGQVSVEIEWELQKENSKRWNPEIQYTSNYYKSNNVEFAVNTEGVYSEPRPIGTRYLTRNL

SEQ ID NO: 361 - DNA, 2205 bp, Artificial Sequence
  source: /note="Description of Artificial Sequence: Synthetic polynucleotide"
atggctgctgacggttatcttccagattggctcgaggacaacctttctgaaggcattcgtgagtggtgggctctgaaacctggagtccctcaacccaaagcgaaccaacaacaccaggacaactgtcggggtcttgtgcttccgggttacaaatacctcggacccggtaacggactcgacaaaggagagccggtcaacgaggcggacgcggcagccctcgaacacgacaaggcctacgaccagcagctcaaggccggagacaacccgtacctcaagtacaaccacgccgacgccgagttccaggagcggctcaaagaagatacgtcttttgggggcaacctcgggcgagcagtcttccagaccaaaaagaggcttcttgaacctcttggtctggttgaggaagcggctaagacggctcctggaaagaagaggcctgtagagcagtctcctcaggaaccggactcctccgcgggtattggcaaatcgggtgcacagcccgctaaaaagagactcaatttcggtcagactggcgacacagagtcagtcccagaccctcaaccaatcggagaacctcccgcagccccctcaggtgtgggatctcttacaatggcttcaggtggtggcgcaccagtggcagacaataacgaaggtgccgatggagtgggtagttcctcgggaaattggcattgcgattcccaatggctgggggacagagtcatcaccaccagcacccgaacctgggccctgcccacctacaacaaccacctctacaaacaaatttccagccaatcaggagcctcgaacgacaatcactactttggctacagcaccccttgggggtattttgacttcaacagattccactgccacttttcaccacgtgactggcagcgactcatcaacaacaactggggattccggcccaagagactcagcttcaagctcttcaacatccaggtcaaagaggttacggacaacaatggagtcaagaccatcgccaataaccttaccagcacggtccaggtcttcacggactcagactatcagctcccgtacgtgctcgggtcggctcacgagggctgcctcccgccgttcccagcggacgttttcatgattcctcagtacgggtatctgacgcttaatgatggaagccaggccgtgggtcgttcgtccttttactgcctggaatatttcccgtcgcaaatgctaagaacgggtaacaacttccagttcagctacgagtttgagaacgtacctttccatagcagctacgctcacagccaaagcctggaccgactaatgaatccactcatcgaccaatacttgtactatctctcaaagactattaacggttctggacagaatcaacaaacgctaaaattcagtgtggccggacccagcaacatggctgtccagggaagaaactacatacctggacccagctaccgacaacaacgtgtctcaaccactgtgactcaaaacaacaacagcgaatttgcttggcctggagcttcttcttgggctctcaatggacgtaatagcttgatgaatcctggacctgctatggccagccacaaagaaggagaggaccgtttctttcctttgtctggatctttaatttttggcaaacaaggaactggaagagacaacgtggatgcggacaaagtcatgataaccaacgaagaagaaattaaaactactaacccggtagcaacggagtcctatggacaagtggccacaaaccaccagagtgcccaagcacaggcgcagaccggctgggttcaaaaccaaggaatacttccgggtatggtttggcaggacagagatgtgtacctgcaaggacccatctgggccaagattcctcacacggacggcaacttccacccgtctccgctgatgggcggctttggcctgaaacatcctccgcctcagatcctgatcaagaacacgcctgttcctgcgaatcctccggcggagttttcagctacaaagtttgcttcattcatcacccagtactccacaggacaagtgagtgtggaaattgaatgggagctgcagaaagaaaacagcaagcgctggaatcccgaagtgcagtacacatccaattatgcaaaatctgccaacgttgattttactgtggacaacaatggactttatactgagcctcgccccattggcacccgttaccttaccaaacctctgtaa

SEQ ID NO: 362 - protein, 734 aa, Artificial Sequence
  source: /note="Description of Artificial Sequence: Synthetic polypeptide"
MAADGYLPDWLEDNLSEGIREWWALKPGVPQPKANQQHQDNCRGLVLPGYKYLGPGNGLDKGEPVNEADAAALEHDKAYDQQLKAGDNPYLKYNHADAEFQERLKEDTSFGGNLGRAVFQTKKRLLEPLGLVEEAAKTAPGKKRPVEQSPQEPDSSAGIGKSGAQPAKKRLNFGQTGDTESVPDPQPIGEPPAAPSGVGSLTMASGGGAPVADNNEGADGVGSSSGNWHCDSQWLGDRVITTSTRTWALPTYNNHLYKQISSQSGASNDNHYFGYSTPWGYFDFNRFHCHFSPRDWQRLINNNWGFRPKRLSFKLFNIQVKEVTDNNGVKTIANNLTSTVQVFTDSDYQLPYVLGSAHEGCLPPFPADVFMIPQYGYLTLNDGSQAVGRSSFYCLEYFPSQMLRTGNNFQFSYEFENVPFHSSYAHSQSLDRLMNPLIDQYLYYLSKTINGSGQNQQTLKFSVAGPSNMAVQGRNYIPGPSYRQQRVSTTVTQNNNSEFAWPGASSWALNGRNSLMNPGPAMASHKEGEDRFFPLSGSLIFGKQGTGRDNVDADKVMITNEEEIKTTNPVATESYGQVATNHQSAQAQAQTGWVQNQGILPGMVWQDRDVYLQGPIWAKIPHTDGNFHPSPLMGGFGLKHPPPQILIKNTPVPANPPAEFSATKFASFITQYSTGQVSVEIEWELQKENSKRWNPEVQYTSNYAKSANVDFTVDNNGLYTEPRPIGTRYLTKPL

SEQ ID NO: 363 - DNA, 2211 bp, Artificial Sequence
  source: /note="Description of Artificial Sequence: Synthetic polynucleotide"
atggctgccgatggttatcttccagattggctcgaggacaacctctctgagggcattcgcgagtggtgggacttgaaacctggagcccctaaacccaaggcaaatcaacaacatcaggacaacgctcgaggtcttgtgcttccgggttacaaataccttggacccggcaacggactcgacaagggggagccggtcaacgcagcagacgcggcggccctcgagcacgacaaggcctacgaccagcagctcaaggccggagacaacccgtacctcaagtacaaccacgccgacgccgagttccaggagcggctcaaagaagatacgtcttttgggggcaacctcgggcgagcagtcttccaggccaaaaagaggcttcttgaacctcttggtctggttgaggaagcggctaagacggctcctggaaagaagagaccggtagagccatcaccccagcgttctccagactcctctacgggcatcggcaagaaaggccaacagcccgctaaaaagagactcaattttggtcagactggcgactcagagtcagtccccgacccacaacctctcggagaacctccagcaacccccgctgctgtgggacctactacaatggcttcaggcggtggcgcaccaatggcagacaataacgagggtgccgatggagtgggtaattcctcaggaaattggcattgcgattcccaatggctgggcgacagagtcatcaccaccagcaccagaacctgggccctgcccacttacaacaaccatctctacaagcaaatctccagccaatcaggagcttcaaacgacaaccactactttggctacagcaccccttgggggtattttgactttaacagattccactgccacttttcaccacgtgactggcaaagactcatcaacaacaactggggattccgacccaagagactcaacttcaagctcttcaacatccaagtcaaggaggtcacgacgaatgatggcgtcacgaccatcgctaataaccttaccagcacggttcaagtcttctcggactcggagtaccagttgccgtacgtcctcggctctgcgcaccagggctgcctccctccgttcccggcggacgtgttcatgattccgcagtacggctacctaacgctcaacaatggcagccaagccgtgggacgttcatccttttactgcctggaatatttcccttctcagatgctgagaacgggcaacaactttaccttcagctacacttttgaggacgttcctttccacagcagctacgctcacagccagagtctggaccgtctcatgaatcctctcatcgaccagtacctgtattacttgagcagaacaaacactccaagtggaaccaccacgcagtcaaggcttcagttttctcaggccggagcgagtgacattcgggaccagtctaggaactggcttcctggaccctgttaccgccagcagcgcgtttctaaaacaaaaacagacaacaacaacagcaattttacctggactggtgcttcaaaatataaccttaatgggcgtgaatctataatcaaccctggcactgctatggcctcacacaaagacgacgaagacaagttctttcccatgagcggtgtcatgatttttggaaaagagagcgccggagcttcaaacactgcattggacaatgtcatgatcacagacgaagaggaaatcaaagccactaaccccgtggccaccgaaagatttgggactgtggcagtcaatctccagagcagcagcacagaccctgcgaccggagatgtgcatgttatgggagcattacctggcatggtgtggcaagatagagacgtgtacctgcagggtcccatttgggccaaaattcctcacacagatggacactttcacccgtctcctcttatgggcggctttggactcaagaacccgcctcctcagatcctcatcaaaaacacgcctgttcctgcgaatcctccggcggagttttcagctacaaagtttgcttcattcatcacccaatactccacaggacaagtgagtgtggaaattgaatgggagctgcagaaagaaaacagcaagcgctggaatcccgaagtgcagtacacatccaattatgcaaaatctgccaacgttgattttactgtggacaacaatggactttatactgagcctcgccccattggcacccgttaccttacccgtcccctgtaa

SEQ ID NO: 364 - protein, 736 aa, Artificial Sequence
  source: /note="Description of Artificial Sequence: Synthetic polypeptide"
MAADGYLPDWLEDNLSEGIREWWDLKPGAPKPKANQQHQDNARGLVLPGYKYLGPGNGLDKGEPVNAADAAALEHDKAYDQQLKAGDNPYLKYNHADAEFQERLKEDTSFGGNLGRAVFQAKKRLLEPLGLVEEAAKTAPGKKRPVEPSPQRSPDSSTGIGKKGQQPAKKRLNFGQTGDSESVPDPQPLGEPPATPAAVGPTTMASGGGAPMADNNEGADGVGNSSGNWHCDSQWLGDRVITTSTRTWALPTYNNHLYKQISSQSGASNDNHYFGYSTPWGYFDFNRFHCHFSPRDWQRLINNNWGFRPKRLNFKLFNIQVKEVTTNDGVTTIANNLTSTVQVFSDSEYQLPYVLGSAHQGCLPPFPADVFMIPQYGYLTLNNGSQAVGRSSFYCLEYFPSQMLRTGNNFTFSYTFEDVPFHSSYAHSQSLDRLMNPLIDQYLYYLSRTNTPSGTTTQSRLQFSQAGASDIRDQSRNWLPGPCYRQQRVSKTKTDNNNSNFTWTGASKYNLNGRESIINPGTAMASHKDDEDKFFPMSGVMIFGKESAGASNTALDNVMITDEEEIKATNPVATERFGTVAVNLQSSSTDPATGDVHVMGALPGMVWQDRDVYLQGPIWAKIPHTDGHFHPSPLMGGFGLKNPPPQILIKNTPVPANPPAEFSATKFASFITQYSTGQVSVEIEWELQKENSKRWNPEVQYTSNYAKSANVDFTVDNNGLYTEPRPIGTRYLTRPL

SEQ ID NO: 365 - DNA, 2214 bp, Artificial Sequence; identical to SEQ ID NO: 337
  source: /note="Description of Artificial Sequence: Synthetic polynucleotide"

SEQ ID NO: 366 - protein, 737 aa, Artificial Sequence; identical to SEQ ID NO: 338
  source: /note="Description of Artificial Sequence: Synthetic polypeptide"

SEQ ID NO: 367 - DNA, 2205 bp, Artificial Sequence
  source: /note="Description of Artificial Sequence: Synthetic polynucleotide"
atggctgctgacggttatcttccagattggctcgaggacaacctttctgaaggcattcgtgagtggtgggctctgaaacctggagtccctcaacccaaagcgaaccaacaacaccaggacaaccgtcggggtcttgtgcttccgggttacaaatacctcggacccggtaacggactcgacaaaggagagccggtcaacgaggcggacgcggcagccctcgaacacgacaaggcctacgaccagcagctcaaggccggagacaacccgtacctcaagtacaaccacgccgacgccgagttccaggagcggctcaaagaagatacgtcttttgggggcaacctcgggcgagcagtcttccaggccaaaaagaggcttcttgaacctcttggtctggttgaggaagcggctaagacggctcctggaaagaagaggcctgtagagcagtctcctcaggaaccggactcctccgcgggtattggcaaatcgggtgcacagcccgctaaaaagagactcaatttcggtcagactggcgacacagagtcagtcccagaccctcaaccaatcggagaacctcccgcagccccctcaggtgtgggatctcttacaatggcttcaggtggtggcgcaccagtggcagacaataacgaaggtgccgatggagtgggtagttcctcgggaaattggcattgcgattcccaatggctgggggacagagtcatcaccaccagcacccgaacctgggccctgcccacctacaacaaccacctctacaaacaaatttccagccaatcaggagcctcgaacgacaatcactactttggctacagcaccccttgggggtattttgacttcaacagattccactgccacttttcaccacgtgactggcagcgactcatcaacaacaactggggattccggcccaagagactcagcttcaagctcttcaacatccaggtcaaagaggttacggacaacaatggagtcaagaccatcgccaataaccttaccagcacggtccaggtcttcacggactcagactatcagctcccgtacgtgctcgggtcggctcacgagggctgcctcccgccgttcccagcggacgttttcatgattcctcagtacgggtatctgacgcttaatgatggaagccaggccgtgggtcgttcgtccttttactgcctggaatatttcccgtcgcaaatgctaagaacgggtaacaacttccagttcagctacgagtttgagaacgtacctttccatagcagctacgctcacagccaaagcctggaccgactaatgaatccactcatcgaccaatacttgtactatctctcaaagactattaacggttctggacagaatcaacaaacgctaaaattcagtgtggccggacccagcaacatggctgtccagggaagaaactacatacctggacccagctaccgacaacaacgtgtctcaaccactgtgactcaaaacaacaacagcgaatttgcttggcctggagcttcttcttgggctctcaatggacgtaatagcttgatgaatcctggacctgctatggccagccacaaagaaggagaggaccgtttctttcctttgtctggatctttaatttttggcaaacaaggaactggaagagacaacgtggatgcggacaaagtcatgataaccaacgaagaagaaattaaaactactaacccggtagcaacggagtcctatggacaagtggccacaaaccaccagagtgcccaagcacaggcgcagaccggctgggttcaaaaccaaggaatacttccgggtatggtttggcaggacagagatgtgtacctgcaaggacccatttgggccaaaattcctcacacggacggcaactttcacccttctccgctgatgggagggtttggaatgaaacacccgcctcctcagatcctcatcaaaaacacacctgtacctgcggatcctccaacggccttcaacaaggacaagctgaactctttcatcacccagtattctactggccaagtcagcgtggagatcgagtgggagctgcagaaggaaaacagcaagcgctggaaccccgagatccagtacacctccaactactacaaatctacaagtgtggactttgctgttaatacagaaggcgtgtactctgaaccccgccccattggcacccgttacctcacccgtaatctgtaa

SEQ ID NO: 368 - protein, 734 aa, Artificial Sequence
  source: /note="Description of Artificial Sequence: Synthetic polypeptide"
MAADGYLPDWLEDNLSEGIREWWALKPGVPQPKANQQHQDNRRGLVLPGYKYLGPGNGLDKGEPVNEADAAALEHDKAYDQQLKAGDNPYLKYNHADAEFQERLKEDTSFGGNLGRAVFQAKKRLLEPLGLVEEAAKTAPGKKRPVEQSPQEPDSSAGIGKSGAQPAKKRLNFGQTGDTESVPDPQPIGEPPAAPSGVGSLTMASGGGAPVADNNEGADGVGSSSGNWHCDSQWLGDRVITTSTRTWALPTYNNHLYKQISSQSGASNDNHYFGYSTPWGYFDFNRFHCHFSPRDWQRLINNNWGFRPKRLSFKLFNIQVKEVTDNNGVKTIANNLTSTVQVFTDSDYQLPYVLGSAHEGCLPPFPADVFMIPQYGYLTLNDGSQAVGRSSFYCLEYFPSQMLRTGNNFQFSYEFENVPFHSSYAHSQSLDRLMNPLIDQYLYYLSKTINGSGQNQQTLKFSVAGPSNMAVQGRNYIPGPSYRQQRVSTTVTQNNNSEFAWPGASSWALNGRNSLMNPGPAMASHKEGEDRFFPLSGSLIFGKQGTGRDNVDADKVMITNEEEIKTTNPVATESYGQVATNHQSAQAQAQTGWVQNQGILPGMVWQDRDVYLQGPIWAKIPHTDGNFHPSPLMGGFGMKHPPPQILIKNTPVPADPPTAFNKDKLNSFITQYSTGQVSVEIEWELQKENSKRWNPEIQYTSNYYKSTSVDFAVNTEGVYSEPRPIGTRYLTRNL

SEQ ID NO: 369 - DNA, 2217 bp, Artificial Sequence
  source: /note="Description of Artificial Sequence: Synthetic polynucleotide"
atggctgccgatggttatcttccagattggctcgaggacaacctctctgagggcattcgcgagtggtgggcgctgaaacctggagccccgaagcccaaagccaaccagcaaaagcaggacgacggccggggtctggtgcttcctggctacaagtacctcggacccttcaacggactcgacaagggggagcccgtcaacgcggcggacgcagcggccctcgagcacgacaaggcctacgaccagcagctgcaggcgggtgacaatccgtacctgcggtataaccacgccgacgccgagtttcaggagcgtctgcaagaagatacgtcttttgggggcaacctcgggcgagcagtcttccaggccaagaagcgggttctcgaacctctcggtctggttgaggaaggcgctaagacggctcctggaaagaagagaccggtagagccatcaccccagcgttctccagactcctctacgggcatcggcaagaaaggccaacagcccgccagaaaaagactcaattttggtcagactggcgactcagagtcagttccagaccctcaacctctcggagaacctccagcagcgccctctggtgtgggacctaatacaatggctgcaggcggtggcgcaccaatggcagacaataacgaaggcgccgacggagtgggtagttcctcgggaaattggcattgcgattccacatggctgggcgacagagtcatcaccaccagcacccgaacctgggccctgcccacctacaacaaccacctctacaagcaaatctccaacgggacatcgggaggagccaccaacgacaacacctacttcggctacagcaccccctgggggtattttgactttaacagattccactgccacttttcaccacgtgactggcagcgactcatcaacaacaactggggattccggcccaagagactcagcttcaagctcttcaacatccaggtcaaggaggtcacgcagaatgaaggcaccaagaccatcgccaataacctcaccagcaccatccaggtgtttacggactcggagtaccagctgccgtacgttctcggctctgcccaccagggctgcctgcctccgttcccggcggacgtgttcatgattccccagtacggctacctaacactcaacaacggtagtcaggccgtgggacgctcctccttctactgcctggaatactttccttcgcagatgctgagaaccggcaacaacttccagtttacttacaccttcgaggacgtgcctttccacagcagctacgcccacagccagagcttggaccggctgatgaatcctctgattgaccagtacctgtactacttgtctcggactcaaacaacaggaggcacggcaaatacgcagactctgggcttcagccaaggtgggcctaatacaatggccaatcaggcaaagaactggctgccaggaccctgttaccgccaacaacgcgtctcaacgacaaccgggcaaaacaacaatagcaactttgcctggactgctgggaccaaataccatctgaatggaagaaattcattggctaatcctggcatcgctatggcaacacacaaagacgacgaggagcgtttttttcccagtaacgggatcctgatttttggcaaacaaaatgctgccagagacaatgcggattacagcgatgtcatgctcaccagcgaggaagaaatcaaaaccactaaccctgtggctacagaggaatacggtatcgtggcagataacttgcagcagcaaaacacggctcctcaaattggaactgtcaacagccagggggccttacccggtatggtctggcagaaccgggacgtgtacctgcagggtcccatctgggccaagattcctcacacggacggcaacttccacccctctcccctcatgggtggattcggacttaaacatcctccgcctcagatcctgatcaagaacacgcctgtacctgcggatcctccgaccaccttcaaccagtcaaagctgaactctttcatcacgcaatacagcaccggacaggtcagcgtggaaattgaatgggagctgcagaaggaaaacagcaagcgctggaaccccgagatccagtacacctccaactactacaaatctacaagtgtggactttgctgttaatacagaaggcgtgtactctgaaccccgccccattggcacccgttacctcacccgtaatctgtaa

SEQ ID NO: 370 - protein, 738 aa, Artificial Sequence; identical to SEQ ID NO: 116
  source: /note="Description of Artificial Sequence: Synthetic polypeptide"

SEQ ID NO: 371 - DNA, 2211 bp, Artificial Sequence
  source: /note="Description of Artificial Sequence: Synthetic polynucleotide"
atggctgctgacggttatcttccagattggctcgaggacaacctttctgaaggcattcgagagtggtgggcgctgcaacctggagcccctaaacccaaggcaaatcaacaacatcaggacaacgctcggggtcttgtgcttccgggttacaaatacctcggacccggcaacggactcgacaagggggaacccgtcaacgcagcggacgcggcagccctcgagcacgacaaggcctacgaccagcagctcaaggccggtgacaacccctacctcaagtacaaccacgccgacgccgagttccaggagcggctcaaagaagatacgtcttttgggggcaacctcgggcgagcagtcttccaggccaaaaagaggcttcttgaacctcttggtctggttgaggaagcggctaagacggctcctggaaagaagaggcctgtagatcagtctcctcaggaaccggactcatcatctggtgttggcaaatcgggcaaacagcctgccagaaaaagactaaatttcggtcagactggcgactcagagtcagtcccagaccctcaacctctcggagaaccaccagcagcccccacaagtttgggatctaatacaatggcttcaggcggtggcgcaccaatggcagacaataacgagggtgccgatggagtgggtaattcctcaggaaattggcattgcgattcccaatggctgggcgacagagtcatcaccaccagcaccagaacctgggccctgcccacttacaacaaccatctctacaagcaaatctccagccaatcaggagcttcaaacgacaaccactactttggctacagcaccccttgggggtattttgactttaacagattccactgccacttctcaccacgtgactggcagcgactcattaacaacaactggggattccggcccaagaaactcagcttcaagctcttcaacatccaagttaaagaggtcacgcagaacgatggcacgacgactattgccaataaccttaccagcacggttcaggtgtttacggactcggagtatcagctcccgtacgtgctcgggtcggcgcaccaaggctgtctcccgccgtttccagcggacgtcttcatggtccctcagtatggatacctcaccctgaacaacggaagtcaagcggtgggacgctcatccttttactgcctggagtacttcccttcgcagatgctaaggactggaaataacttccaattcagctataccttcgaggatgtaccttttcacagcagctacgctcacagccagagtttggatcgcttgatgaatcctcttattgatcagtatctgtactacctgaacagaacgcaaggaacaacctctggaacaaccaaccaatcacggctgctttttagccaggctgggcctcagtctatgtctttgcaggccagaaattggctacctgggccctgctaccggcaacagagactttcaaagactgctaacgacaacaacaacagtaactttccttggacagcggccagcaaatatcatctcaatggccgcgactcgctggtgaatccaggaccagctatggccagtcacaaggacgatgaagaaaaatttttccctatgcacggcaatctaatatttggcaaagaagggacaacggcaagtaacgcagaattagataatgtaatgattacggatgaagaagagattcgtaccaccaatcctgtggcaacagagcagtatggaactgtggcaaataacttgcagagctcaaatacagctcccacgactagaactgtcaatgatcagggggccttacctggcatggtgtggcaagatcgtgacgtgtaccttcaaggacctatctgggcaaagattcctcacacggatggacactttcatccttctcctctgatgggaggctttggactgaaacatccgcctcctcaaatcatgatcaaaaatactccggtaccggcaaatcctccgacgactttcagcccggccaagtttgcttcatttatcactcagtactccactggacaggtcagcgtggaaattgagtgggagctacagaaagaaaacagcaaacgttggaatccagagattcagtacacttccaactacaacaagtctgttaatgtggactttactgtagacactaatggtgtttatagtgaacctcgccccattggcacccgttaccttacccgtcccctgtaa

SEQ ID NO: 372 - protein, 736 aa, Artificial Sequence; identical to SEQ ID NO: 342
  source: /note="Description of Artificial Sequence: Synthetic polypeptide"

SEQ ID NO: 373 - DNA, 2211 bp, Artificial Sequence; identical to SEQ ID NO: 341
  source: /note="Description of Artificial Sequence: Synthetic polynucleotide"

SEQ ID NO: 374 - protein, 736 aa, Artificial Sequence; identical to SEQ ID NO: 342
  source: /note="Description of Artificial Sequence: Synthetic polypeptide"

SEQ ID NO: 375 - DNA, 2211 bp, Artificial Sequence
  source: /note="Description of Artificial Sequence: Synthetic polynucleotide"
atggctgctgacggttatcttccagattggctcgaggacaacctttctgaaggcattcgtgagtggtgggctctgaaacctggagtccctcaacccaaagcgaaccaacaacaccaggacaaccgtcggggtcttgtgcttccgggttacaaatacctcggacccggtaacggactcgacaaaggagagcccgtcaacgcggcggatgcagcggccctcgagcacgacaaggcctacgaccagcagctcaaagcgggtgacaatccgtacctgcggtataaccacgccgacgccgagtttcaggagcgtctgcaagaagatacgtcttttgggggcaacctcgggcgagcagtcttccaggccaagaagagggttctcgaaccttttggtctggttgaggaaggtgctaagacggctcctggaaagaaacgtccggtagagcagtcgccacaagagccagactcctcctcgggcatcggcaagacaggccagcagcccgctaaaaagagactcaattttggtcagactggcgactcagagtcagtccccgacccacaacctctcggagaacctccagcaacccccgctgctgtgggacctactacaatggcttcaggcggtggcgcaccaatggcagacaataacgaaggcgccgacggagtgggtaatgcctcaggaaattggcattgcgattccacatggctgggcgacagagtcatcaccaccagcacccgcacctgggccttgcccacctacaataaccacctctacaagcaaatctccagtgcttcaacgggggccagcaacgacaaccactacttcggctacagcaccccctgggggtattttgatttcaacagattccactgccatttctcaccacgtgactggcagcgactcatcaacaacaattggggattccggcccaagagactcaacttcaagctcttcaacatccaagtcaaggaggtcacgacgaatgatggcgtcacgaccatcgctaataaccttaccagcacggttcaagtcttctcggactcggagtaccagcttccgtacgtcctcggctctgcgcaccagggctgcctccctccgttcccggcggacgtgttcatgattccgcaatacggctacctgacgctcaacaatggcagccaagccgtgggacgttcatccttttactgcctggaatatttcccttctcagatgctgagaacgggcaacaactttaccttcagctacacctttgaggaagtgcctttccacagcagctacgcgcacagccagagcctggaccggctgatgaatcctctcatcgaccaatacctgtattacctgaacagaactcaaaatcagtccggaagtgcccaaaacaaggacttgctgtttagccgtgggtctccagctggcatgtctgttcagcccaaaaactggctacctggaccctgttatcggcagcagcgcgtttctaaaacaaaaacagacaacaacaacagcaattttacctggactggtgcttcaaaatataacctcaatgggcgtgaatccatcatcaaccctggcactgctatggcctcacacaaagacgacgaagacaagttctttcccatgagcggtgtcatgatttttggaaaagagagcgccggagcttcaaacactgcattggacaatgtcatgattacagacgaagaggaaattaaagccactaaccctgtggccaccgaaagatttgggaccgtggcagtcaatttccagagcagcagcacagaccctgcgaccggagatgtgcatgttatgggagccttacctggaatggtgtggcaagacagagacgtatacctgcagggtcctatttgggccaaaattcctcacacggatggacactttcacccgtctcctctcatgggcggctttggacttaagcacccgcctcctcagatcctcatcaaaaacacgcctgttcctgcgaatcctccggcagagttttcggctacaaagtttgcttcattcatcacccagtattccacaggacaagtgagcgtggagattgaatgggagctgcagaaagaaaacagcaaacgctggaatcccgaagtgcagtatacatctaactatgcaaaatctgccaacgttgatttcactgtggacaacaatggactttatactgagcctcgccccattggcacccgttacctcacccgtcccctgtaa

SEQ ID NO: 376 - protein, 736 aa, Artificial Sequence
  source: /note="Description of Artificial Sequence: Synthetic polypeptide"
MAADGYLPDWLEDNLSEGIREWWALKPGVPQPKANQQHQDNRRGLVLPGYKYLGPGNGLDKGEPVNAADAAALEHDKAYDQQLKAGDNPYLRYNHADAEFQERLQEDTSFGGNLGRAVFQAKKRVLEPFGLVEEGAKTAPGKKRPVEQSPQEPDSSSGIGKTGQQPAKKRLNFGQTGDSESVPDPQPLGEPPATPAAVGPTTMASGGGAPMADNNEGADGVGNASGNWHCDSTWLGDRVITTSTRTWALPTYNNHLYKQISSASTGASNDNHYFGYSTPWGYFDFNRFHCHFSPRDWQRLINNNWGFRPKRLNFKLFNIQVKEVTTNDGVTTIANNLTSTVQVFSDSEYQLPYVLGSAHQGCLPPFPADVFMIPQYGYLTLNNGSQAVGRSSFYCLEYFPSQMLRTGNNFTFSYTFEEVPFHSSYAHSQSLDRLMNPLIDQYLYYLNRTQNQSGSAQNKDLLFSRGSPAGMSVQPKNWLPGPCYRQQRVSKTKTDNNNSNFTWTGASKYNLNGRESIINPGTAMASHKDDEDKFFPMSGVMIFGKESAGASNTALDNVMITDEEEIKATNPVATERFGTVAVNFQSSSTDPATGDVHVMGALPGMVWQDRDVYLQGPIWAKIPHTDGHFHPSPLMGGFGLKHPPPQILIKNTPVPANPPAEFSATKFASFITQYSTGQVSVEIEWELQKENSKRWNPEVQYTSNYAKSANVDFTVDNNGLYTEPRPIGTRYLTRPL

SEQ ID NO: 377 - DNA, 2217 bp, Artificial Sequence
  source: /note="Description of Artificial Sequence: Synthetic polynucleotide"
atggctgccgatggttatcttccagattggctcgaggacaacctctctgagggcattcgcgagtggtgggacttgaaacctggagccccgaaacccaaagccaaccagcaaaagcaggacgacggccggggtctggtgcttcctggctacaagtacctcggacccttcaacggactcgacaagggggagcccgtcaacgcggcggatgcaacggccctcgagcacgacaaggcctacgaccagcagctgcaggcgggtgacaatccgtacctgcggtataaccacgccgacgccgagtttcaggagcgtctgcaagaagatacgtcttttgggggcaacctcgggcgagcagtcttccaggccaagaagcgggttctcgaacctctcggtctggttgaggaaggcgctaagacggctcctggaaagaagagaccggtagagccatcaccccagcgttctccagactcctctacgggcatcggcaagaaaggccaacagcccgccagaaaaagactcaattttggtcagactggcgactcagagtcagttccagaccctcaacctctcggagaaccaccagcagcccccacaagtttgggatctaatacaatggcttcaggcggtggcgcaccaatggcagacaataacgagggtgccgatggagtgggtaattcctcaggaaattggcattgcgattcccaatggctgggcgacagagtcatcaccaccagcacccgcacctgggccttgcccacctacaataaccacctctacaagcaaatctccagtgcttcaacgggggccagcaacgacaaccactacttcggctacagcaccccctgggggtattttgactttaaccgcttccactgccacttctcgccaagagactggcaaagactcatcaacaacaattggggattccggcccaagagactcaacttcaaactcttcaacatccaagtcaaggaggtcacgacgaatgatggcgtcacgaccatcgccaataacctcaccagcaccatccaggtgtttacggactcggagtaccagctgccgtacgttctcggctctgcccaccagggctgcctgcctccgttcccggcggacgtgttcatgattccccagtatggatacctcaccctgaacaacggaagtcaagcggtgggacgctcatccttttactgcctggagtacttcccttcgcagatgctaaggactggaaataacttccaattcagctataccttcgaggatgtaccttttcacagcagctacgctcacagccagagtttggatcgcttgatgaatcctcttattgatcagtatctgtactacctgaacagaacgcaaggaacaacctctggaacaaccaaccaatcacggctgctttttagccaggctgggcctcagtctatgtctttgcaggccagaaattggctacctgggccctgctaccggcaacagagactttcaaagactgctaacgacaacaacaacagtaactttccttggacagcagccagcaaatatcatctcaatggccgcgactcgctggtgaatccaggaccagctatggccagtcacaaggacgatgaagaaaaatttttccctatgcacggcaatctaatatttggcaaagaagggacaacggcaagtaacgcagaattagataatgtaatgattacggatgaagaagagattcgtaccaccaatcctgtggcaacagagcagtatggaactgtggcaaataacttgcagagctcaaatacagctcccacgactagaactgtcaatgatcagggggccttacctggcatggtgtggcaagatcgtgacgtgtaccttcaggggcccatctgggcaaagattccacacacggacggacattttcacccctctcccctcatgggtggattcggacttaaacaccctcctccgcagattctcatcaagaacaccccggtacctgcgaatccttcgaccaccttcagtgcggcaaagtttgcttccttcatcacacagtactccacgggacaggtcagcgtggagatcgagtgggagctgcagaaggaaaacagcaagcgctggaacccggagatccagtacacttccaactattacaagtctaataatgttgaatttgctgttaatactgaaggtgtatatagtgaaccccgccccattggcaccagatacctgactcgtaatctgtaa

SEQ ID NO: 378 - protein, 738 aa, Artificial Sequence
  source: /note="Description of Artificial Sequence: Synthetic polypeptide"
MAADGYLPDWLEDNLSEGIREWWDLKPGAPKPKANQQKQDDGRGLVLPGYKYLGPFNGLDKGEPVNAADATALEHDKAYDQQLQAGDNPYLRYNHADAEFQERLQEDTSFGGNLGRAVFQAKKRVLEPLGLVEEGAKTAPGKKRPVEPSPQRSPDSSTGIGKKGQQPARKRLNFGQTGDSESVPDPQPLGEPPAAPTSLGSNTMASGGGAPMADNNEGADGVGNSSGNWHCDSQWLGDRVITTSTRTWALPTYNNHLYKQISSASTGASNDNHYFGYSTPWGYFDFNRFHCHFSPRDWQRLINNNWGFRPKRLNFKLFNIQVKEVTTNDGVTTIANNLTSTIQVFTDSEYQLPYVLGSAHQGCLPPFPADVFMIPQYGYLTLNNGSQAVGRSSFYCLEYFPSQMLRTGNNFQFSYTFEDVPFHSSYAHSQSLDRLMNPLIDQYLYYLNRTQGTTSGTTNQSRLLFSQAGPQSMSLQARNWLPGPCYRQQRLSKTANDNNNSNFPWTAASKYHLNGRDSLVNPGPAMASHKDDEEKFFPMHGNLIFGKEGTTASNAELDNVMITDEEEIRTTNPVATEQYGTVANNLQSSNTAPTTRTVNDQGALPGMVWQDRDVYLQGPIWAKIPHTDGHFHPSPLMGGFGLKHPPPQILIKNTPVPANPSTTFSAAKFASFITQYSTGQVSVEIEWELQKENSKRWNPEIQYTSNYYKSNNVEFAVNTEGVYSEPRPIGTRYLTRNL

SEQ ID NO: 379 - DNA, 2208 bp, Artificial Sequence
  source: /note="Description of Artificial Sequence: Synthetic polynucleotide"
atggctgccgatggttatcttccagattggctcgaggacaaccttagtgaaggaattcgcgagtggtgggacttgaaacctggagccccgaagcccaaagccaaccagcaaaagcaggacgacggccggggtctggtgcttcctggctacaagtacctcggacccttcaacggactcgacaagggggagcccgtcaacgcggcggacgcagcggccctcgagcacgacaaggcctacgaccagcagctcaaagcgggtgacaatccgtacctgcggtataaccacgccgacgccgagtttcaggagcgtctgcaagaagatacgtcttttgggggcaacctcgggcgagcagtcttccaggccaagaagcgggttctcgaacctctcggtctggttgaggaaggtgctaagacggctcctggaaagaaacgtccggtagagcagtcgccacaagagccagactcctcctcgggcattggcaagacaggccagcagcccgctaaaaagagactcaattttggtcagactggcgactcagagtcagtccccgacccacaacctctcggagaacctccagcaacccccgctgctgtgggacctactacaatggcttcaggcggtggcgcaccaatggcagacaataacgaaggcgccgacggagtgggtaatgcctcaggaaattggcattgcgattccacatggctgggcgacagagtcatcaccaccagcacccgaacctgggccctgcccacctacaacaaccacctctacaaacaaatttccagccaatcaggagcctcgaacgacaatcactactttggctacagcaccccttgggggtattttgatttcaacagattccactgccacttttcaccacgtgactggcagcgactcatcaacaacaattggggattccggcccaagagactcagcttcaagctcttcaacatccaggtcaaggaggtcacgcagaatgaaggcaccaagaccatcgccaataaccttaccagcacggttcaagtgtttacggactcggagtatcagctcccgtacgtgctcggctcggcgcatcaaggatgcctcccgccgttcccagcagacgtcttcatggtgccacagtatggatacctcaccctgaacaacgggagtcaggcagtaggacgctcttcattttactgcctggagtactttccttctcagatgctgcgtaccggaaacaactttaccttcagctacacttttgaggacgttcctttccacagcagctacgctcacagccagagtctggaccgtctcatgaatcctctgattgaccagtacctgtattacttgagcagaacaaacactccaagtggaaccaccacgcagtcaaggcttcagttttctcaggccggagcgagtgacattcgggaccagtctaggaactggcttcctggaccctgttaccgccagcagcgagtatcaaagacatctgcggataacaacaacagtgaatactcgtggactggagctaccaagtaccacctcaatggcagagactctctggtgaatccgggcccggccatggcaagccacaaggactatgaagaaaagttttttcctcagagcggggttctcatctttgggaagcaaggctcagagaaaacaaatgtggacattgaaaaggtcatgattacagacgaagaggaaatcaggacaaccaatcccgtggctacggagcagtatggttctgtatctaccaacctccagagaggcaacagacaagcagctaccgcagatgtcaacacacaaggcgttcttccaggcatggtctggcaggacagagatgtgtaccttcaggggcccatctgggcaaagattccacacacggacggacattttcacccgtctccgctgatgggcggctttggcctgaaacatcctccgcctcagatcctgatcaagaacacgcctgtacctgcggatcctccgaccaccttcaaccagtcaaagctgaactctttcatcactcagtattctactggccaagtcagcgtggagatcgagtgggagctgcagaaggaaaacagcaagcgctggaaccccgagatccagtacacctccaactactacaaatctacaagtgtggactttgctgttaatacagaaggcgtgtactctgaaccccgccccattggcacccgttacctcacccgtaatctgtaa

SEQ ID NO: 380 - protein, 735 aa, Artificial Sequence
  source: /note="Description of Artificial Sequence: Synthetic polypeptide"
MAADGYLPDWLEDNLSEGIREWWDLKPGAPKPKANQQKQDDGRGLVLPGYKYLGPFNGLDKGEPVNAADAAALEHDKAYDQQLKAGDNPYLRYNHADAEFQERLQEDTSFGGNLGRAVFQAKKRVLEPLGLVEEGAKTAPGKKRPVEQSPQEPDSSSGIGKTGQQPAKKRLNFGQTGDSESVPDPQPLGEPPATPAAVGPTTMASGGGAPMADNNEGADGVGNASGNWHCDSTWLGDRVITTSTRTWALPTYNNHLYKQISSQSGASNDNHYFGYSTPWGYFDFNRFHCHFSPRDWQRLINNNWGFRPKRLSFKLFNIQVKEVTQNEGTKTIANNLTSTVQVFTDSEYQLPYVLGSAHQGCLPPFPADVFMVPQYGYLTLNNGSQAVGRSSFYCLEYFPSQMLRTGNNFTFSYTFEDVPFHSSYAHSQSLDRLMNPLIDQYLYYLSRTNTPSGTTTQSRLQFSQAGASDIRDQSRNWLPGPCYRQQRVSKTSADNNNSEYSWTGATKYHLNGRDSLVNPGPAMASHKDYEEKFFPQSGVLIFGKQGSEKTNVDIEKVMITDEEEIRTTNPVATEQYGSVSTNLQRGNRQAATADVNTQGVLPGMVWQDRDVYLQGPIWAKIPHTDGHFHPSPLMGGFGLKHPPPQILIKNTPVPADPPTTFNQSKLNSFITQYSTGQVSVEIEWELQKENSKRWNPEIQYTSNYYKSTSVDFAVNTEGVYSEPRPIGTRYLTRNL

SEQ ID NO: 381 - DNA, 2214 bp, Artificial Sequence
  source: /note="Description of Artificial Sequence: Synthetic polynucleotide"
atggctgccgatggttatcttccagattggctcgaggacaacctctctgagggcattcgcgagtggtgggacttgaaacctggagccccgaaacccaaagccaaccagcaaaagcaggacgacggccggggtctggtgcttcctggctacaagtacctcggacccttcaacggactcgacaagggggagcccgtcaacgcggcggatgcagcggccctcgagcacgacaaggcctacgaccagcagctcaaagcgggtgacaatccgtacctgcggtataaccacgccgacgccgagtttcaggagcgtctgcaagaagatacgtcttttgggggcaacctcgggcgagcagtcttccaggccaagaagagggttctcgaaccttttggtctggttgaggaaggtgctaagacggctcctggaaagaaacgtccggtagagcagtcgccacaagagccagactcctcctcgggcattggcaagacaggccagcagcctgcaagaaaaagattgaattttggtcagactggagacgcagactcagtacctgacccccagcctctcggacagccaccagcagccccctctggtctgggaactaatacgatggctacaggcagtggcgcaccaatggcagacaataacgagggcgccgacggagtgggtaattcctcgggaaattggcattgcgattcccaatggctgggggacagagtcatcaccaccagcacccgaacctgggccctgcccacctacaacaatcacctctacaagcaaatctccaacagcacatctggaggatcttcaaatgacaacgcctacttcggctacagcaccccctgggggtattttgatttcaacagattccactgccatttctcaccacgtgactggcagcgactcatcaacaacaattggggattccggcccaagagactcaacttcaagctcttcaacatccaggtcaaggaggtcacgcagaatgaaggcaccaagaccatcgccaataacctcaccagcaccatccaggtgtttacggactcggagtaccagctgccgtacgttctcggctctgcccaccagggctgcctgcctccgttcccggcggacgtgttcatgattccccagtacggctacctaacactcaacaacggtagtcaggccgtgggacgctcctccttctactgcctggaatactttccttcgcagatgctgagaaccggcaacaacttccagtttacttacaccttcgaggacgtgcctttccacagcagctacgcccacagccagagcttggaccggctgatgaatcctctgattgaccagtacctgtactacttgtctcggactcaaacaacaggaggcacgacaaatacgcagactctgggcttcagccaaggtgggcctaatacaatggccaatcaggcaaagaactggctgccaggaccctgttaccgccagcagcgagtatcaaagacatttgcggataacaacaacagtgaatactcgtggactggagctaccaagtaccacctcaatggcagagactctctggtgaatccgggcccggccatggcaagccacaaggacgatgaagaaaagttttttcctcagagcggggttctcatctttgggaagcaaggctcagagaaaacaaatgtggacattgaaaaggtcatgattacagacgaagaggaaatcaggacaaccaatcccgtggctacggagcagtatggttctgtatctaccaacctccagagaggcaacagacaagcagctaccgcagatgtcaacacacaaggcgttcttccaggcatggtctggcaggacagagatgtgtaccttcaggggcccatctgggcaaagattccacacacggacggacattttcacccctctcccctcatgggtggattcggacttaaacaccctccgcctcagatcctgatcaagaacacgcctgtacccgcggatcctccgaccaccttcaaccagtcaaagctgaactctttcatcacccagtattctactggccaagtcagcgtggagatcgagtgggagctgcagaaggaaaacagcaagcgctggaaccccgagatccagtacacctccaactactacaaatctacaagtgtggactttgctgttaatacagaaggcgtgtactctgaaccccgccccattggcacccgttacctcacccgtaatctgtaa

SEQ ID NO: 382 - protein, 737 aa, Artificial Sequence
  source: /note="Description of Artificial Sequence: Synthetic polypeptide"
MAADGYLPDWLEDNLSEGIREWWDLKPGAPKPKANQQKQDDGRGLVLPGYKYLGPFNGLDKGEPVNAADAAALEHDKAYDQQLKAGDNPYLRYNHADAEFQERLQEDTSFGGNLGRAVFQAKKRVLEPFGLVEEGAKTAPGKKRPVEQSPQEPDSSSGIGKTGQQPARKRLNFGQTGDADSVPDPQPLGQPPAAPSGLGTNTMATGSGAPMADNNEGADGVGNSSGNWHCDSQWLGDRVITTSTRTWALPTYNNHLYKQISNSTSGGSSNDNAYFGYSTPWGYFDFNRFHCHFSPRDWQRLINNNWGFRPKRLNFKLFNIQVKEVTQNEGTKTIANNLTSTIQVFTDSEYQLPYVLGSAHQGCLPPFPADVFMIPQYGYLTLNNGSQAVGRSSFYCLEYFPSQMLRTGNNFQFTYTFEDVPFHSSYAHSQSLDRLMNPLIDQYLYYLSRTQTTGGTTNTQTLGFSQGGPNTMANQAKNWLPGPCYRQQRVSKTFADNNNSEYSWTGATKYHLNGRDSLVNPGPAMASHKDDEEKFFPQSGVLIFGKQGSEKTNVDIEKVMITDEEEIRTTNPVATEQYGSVSTNLQRGNRQAATADVNTQGVLPGMVWQDRDVYLQGPIWAKIPHTDGHFHPSPLMGGFGLKHPPPQILIKNTPVPADPPTTFNQSKLNSFITQYSTGQVSVEIEWELQKENSKRWNPEIQYTSNYYKSTSVDFAVNTEGVYSEPRPIGTRYLTRNL

SEQ ID NO: 383 - DNA, 2217 bp, Artificial Sequence
  source: /note="Description of Artificial Sequence: Synthetic polynucleotide"
atggctgccgatggttatcttccagattggctcgaggacactctctctgaaggaataagacagtggtgggcgctgaaacctggagccccgaagcccaaagccaaccagcaaaagcaggacgacggccggggtctggtgcttcctggctacaagtacctcggacccttcaacggactcgacaagggggagcccgtcaacgcggcggatgcagcggccctcgagcacgacaaggcctacgaccagcagctcaaagcgggtgacaatccgtacctgcggtataaccacgccgacgccgagtttcaggagcgtctgcaagaagatacgtcttttgggggcaacctcgggcgagcagtcttccaggccaagaagcgggttctcgaacctctcggtctggttgaggaaggcgctaagacggctcctggaaagaagagaccggtagagccatcaccccagcgttctccagactcctctacgggcatcggcaagaaaggccaacagcccgccagaaaaagactcaattttggtcagactggcgactcagagtcagttccagaccctcaacctctcggagaaccaccagcagcccccacaagtttgggatctaatacaatggcttcaggcggtggcgcaccaatggcagacaataacgagggtgccgatggagtgggtaattcctcaggaaattggcattgcgattcccaatggctgggcgacagagtcatcaccaccagcacccgcacctgggccttgcccacctacaataaccacctctacaagcaaatctccagtgcttcaacgggggccagcaacgacaaccactacttcggctacagcaccccctgggggtattttgactttaaccgcttccactgccacttctcgccaagagactggcaaagactcatcaacaacaattggggattccggcccaagagactcaacttcaaactcttcaacatccaagtcaaggaggtcacgacgaatgatggcgtcacgaccatcgccaataacctcaccagcaccatccaggtgtttacggactcggagtaccagctgccgtacgttctcggctctgcccaccagggctgcctgcctccgttcccggcggacgtgttcatgattccccagtatggatacctcaccctgaacaacggaagtcaagcggtgggacgctcatccttttactgcctggagtacttcccttcgcagatgctaaggactggaaataacttccaattcagctataccttcgaggatgtaccttttcacagcagctacgctcacagccagagtttggatcgcttgatgaatcctcttattgatcagtatctgtactacctgaacagaacgcaaggaacaacctctggaacaaccaaccaatcacggctgctttttagccaggctgggcctcagtctatgtctttgcaggccagaaattggctacctgggccctgctaccggcaacagagactttcaaagactgctaacgacaacaacaacagtaactttccttggacagcagccagcaaatatcatctcaatggccgcgactcgctggtgaatccaggaccagctatggccagtcacaaggacgatgaagaaaaatttttccctatgcacggcaatctaatatttggcaaagaagggacaacggcaagtaacgcagaattagataatgtaatgattacggatgaagaagagattcgtaccaccaatcctgtggcaacagagcagtatggaactgtggcaaataacttgcagagctcaaatacagctcccacgactagaactgtcaatgatcagggggccttacctggcatggtgtggcaagatcgtgacgtgtaccttcaggggcccatctgggcaaagattccacacacggacggacattttcacccctctcccctcatgggtggattcggacttaaacaccctcctccgcagattctcatcaagaacaccccggtacctgcgaatccttcgaccaccttcagtgcggcaaagtttgcttccttcatcacacagtactccacgggacaggtcagcgtggagatcgagtgggagctgcagaaggaaaacagcaagcgctggaacccggagatccagtacacttccaactattacaagtctaataatgttgaatttgctgttaatactgaaggtgtatatagtgaaccccgccccattggcaccagatacctgactcgtaatctgtaa

SEQ ID NO: 384 - protein, 738 aa, Artificial Sequence
  source: /note="Description of Artificial Sequence: Synthetic polypeptide"
MAADGYLPDWLEDTLSEGIRQWWALKPGAPKPKANQQKQDDGRGLVLPGYKYLGPFNGLDKGEPVNAADAAALEHDKAYDQQLKAGDNPYLRYNHADAEFQERLQEDTSFGGNLGRAVFQAKKRVLEPLGLVEEGAKTAPGKKRPVEPSPQRSPDSSTGIGKKGQQPARKRLNFGQTGDSESVPDPQPLGEPPAAPTSLGSNTMASGGGAPMADNNEGADGVGNSSGNWHCDSQWLGDRVITTSTRTWALPTYNNHLYKQISSASTGASNDNHYFGYSTPWGYFDFNRFHCHFSPRDWQRLINNNWGFRPKRLNFKLFNIQVKEVTTNDGVTTIANNLTSTIQVFTDSEYQLPYVLGSAHQGCLPPFPADVFMIPQYGYLTLNNGSQAVGRSSFYCLEYFPSQMLRTGNNFQFSYTFEDVPFHSSYAHSQSLDRLMNPLIDQYLYYLNRTQGTTSGTTNQSRLLFSQAGPQSMSLQARNWLPGPCYRQQRLSKTANDNNNSNFPWTAASKYHLNGRDSLVNPGPAMASHKDDEEKFFPMHGNLIFGKEGTTASNAELDNVMITDEEEIRTTNPVATEQYGTVANNLQSSNTAPTTRTVNDQGALPGMVWQDRDVYLQGPIWAKIPHTDGHFHPSPLMGGFGLKHPPPQILIKNTPVPANPSTTFSAAKFASFITQYSTGQVSVEIEWELQKENSKRWNPEIQYTSNYYKSNNVEFAVNTEGVYSEPRPIGTRYLTRNL

SEQ ID NO: 385 - DNA, 2208 bp, Artificial Sequence; identical to SEQ ID NO: 21
  source: /note="Description of Artificial Sequence: Synthetic polynucleotide"

SEQ ID NO: 386 - protein, 735 aa, Artificial Sequence [sequence omitted]

SEQ ID NO: 387 - DNA, 2208 bp, Artificial Sequence
  source: /note="Description of Artificial Sequence: Synthetic polynucleotide"
atggctgccgatggttatcttccagattggctcgaggacaacctctctgagggcattcgcgagtggtgggcgctgaaacctggagccccgaagcccaaagccaaccagcaaaagcaggacgacggccggggtctggtgcttcctggctacaagtacctcggacccttcaacggactcgacaagggggagcccgtcaacgcggcggacgccgcggccctcgagcacgacaaggcctacgaccagcagctgcaggcgggtgacaatccgtacctgcggtataaccacgccgacgccgagtttcaggagcgtctgcaagaagatacgtcttttgggggcaacctcgggcgagcagtcttccaggccaaaaagaggcttcttgaacctcttggtctggttgaggaagcagctaaaacggctcctggaaagaagaggcctgtagagcagtctcctcaggaaccggactcctccgcgggtattggcaaatcgggtgcacagcccgccaaaaagagactcaatttcggtcagactggcgactcagagtcagtcccagaccctcaacctctcggagaaccaccagcagcccccacaagtttgggatctaatacaatggcttcaggcggtggcgcaccaatggcagacaataacgaaggcgccgacggagtgggtaatgcctcaggaaattggcattgcgattccacatggctgggcgacagagtcatcaccaccagcacccgcacctgggccttgcccacctacagcaaccatctctacaagcaaatctccagccaatcaggagcttcaaacgacaacgactactttggctacagcaccccttgggggtattttgatttcaacagattccactgccacttttcaccacgtgactggcaaagactcatcaacaacaactggggattccgacccaagagactcaacttcaagctctttaacattcaagtcaaagaggtcacgcagaatgacggtacgacgacgattgccaataaccttaccagcacggttcaggtgtttactgactcggagtaccagctcccgtacgtcctcggctcggcgcatcaaggatgcctcccgccgttcccagcagacgtcttcatggtgccacagtatggatacctcaccctgaacaacgggagtcaggcagtaggacgctcttcattttactgcctggagtactttccttctcagatgctgcgtaccggaaacaactttaccttcagctacacttttgaggacgttcctttccacagcagctacgctcacagccagagtctggaccgtctcatgaatcctctcatcgaccagtacctgtattacttgagcagaacaaacactccaagtggaaccaccacgcagtcaaggcttcagttttctcaggccggagcgagtgacattcgggaccagtctaggaactggcttcctggaccctgttaccgccagcagcgagtatcaaagacatctgaggataacaacaacagtgaatactcgtggactggagctaccaagtaccacctcaatggcagagactctctggtgaatccgggcccggccatggcaagccacaaggacgatgaagaaaagttttttcctcagagcggggttctcatctttgggaagcaaggctcagagaaaacaaatgtggacattgaaaaggtcatgattacagacgaagaggaaatcaggacaaccaatcccgtggctacggagcagtatggttctgtatctaccaacctccagagaggcaacagacaagcagctaccgcagatgtcaacacacaaggcgttcttccaggcatggtctggcaggacagagatgtgtaccttcaggggcccatctgggcaaagattccacacacggacggacattttcacccctctcccctcatgggtggattcggacttaaacaccctcctccacagattctcatcaagaacaccccggtacctgcgaatccttcgaccaccttcagtgcggcaaagtttgcttccttcatcacacagtactccacgggacaggtcagcgtggagatcgagtgggagctgcagaaggaaaacagcaaacgctggaatcccgaaattcagtacacttccaactacaacaagtctgttaatgtggactttactgtggacactaatggcgtgtattcagagcctcgccccattggcaccagatacctgactcgtaatctgtaa

SEQ ID NO: 388 - protein, 735 aa, Artificial Sequence
  source: /note="Description of Artificial Sequence: Synthetic polypeptide"
MAADGYLPDWLEDNLSEGIREWWALKPGAPKPKANQQKQDDGRGLVLPGYKYLGPFNGLDKGEPVNAADAAALEHDKAYDQQLQAGDNPYLRYNHADAEFQERLQEDTSFGGNLGRAVFQAKKRLLEPLGLVEEAAKTAPGKKRPVEQSPQEPDSSAGIGKSGAQPAKKRLNFGQTGDSESVPDPQPLGEPPAAPTSLGSNTMASGGGAPMADNNEGADGVGNASGNWHCDSTWLGDRVITTSTRTWALPTYSNHLYKQISSQSGASNDNDYFGYSTPWGYFDFNRFHCHFSPRDWQRLINNNWGFRPKRLNFKLFNIQVKEVTQNDGTTTIANNLTSTVQVFTDSEYQLPYVLGSAHQGCLPPFPADVFMVPQYGYLTLNNGSQAVGRSSFYCLEYFPSQMLRTGNNFTFSYTFEDVPFHSSYAHSQSLDRLMNPLIDQYLYYLSRTNTPSGTTTQSRLQFSQAGASDIRDQSRNWLPGPCYRQQRVSKTSEDNNNSEYSWTGATKYHLNGRDSLVNPGPAMASHKDDEEKFFPQSGVLIFGKQGSEKTNVDIEKVMITDEEEIRTTNPVATEQYGSVSTNLQRGNRQAATADVNTQGVLPGMVWQDRDVYLQGPIWAKIPHTDGHFHPSPLMGGFGLKHPPPQILIKNTPVPANPSTTFSAAKFASFITQYSTGQVSVEIEWELQKENSKRWNPEIQYTSNYNKSVNVDFTVDTNGVYSEPRPIGTRYLTRNL

SEQ ID NO: 389 - DNA, 2208 bp, Artificial Sequence
  source: /note="Description of Artificial Sequence: Synthetic polynucleotide"
atggctgccgatggttatcttccagattggctcgaggacaacctctctgagggcattcgcgagtggtgggcgctgaaacctggagccccgaagcccaaagccaaccagcaaaagcaggacgacggccggggtctggtgcttcctggctacaagtacctcggacccttcaacggactcgacaagggggagcccgtcaacgcggcggacgcagcggccctcgagcacgacaaggcctacgaccagcagctgcaggcgggtgacaatccgtacctgcggtataaccacgccgacgccgagttccaggagcgtctgcaagaagatacgtcttttgggggcaacctcgggcgagcagtcttccaggccaagaagagggttctcgaaccttttggtctggttgaggaaggtgctaagacggctcctggaaagaaacgtccggtagagcagtcgccacaagagccagactcctcctcgggcattggcaagacaggccagcagcccgctaaaaagagactcaattttggtcagactggcgactcagagtcagtcccagaccctcaacctctcggagaaccaccagcagcccccacaagtttgggatctaatacaatggcttcaggcggtggcgcaccaatggcagacaataacgagggcgccgacggagtgggtaattcctcgggaaattggcattgcgattccacatggatgggcgacagagtcatcaccaccagcacccgaacctgggccctgcccacctacaacaaccacctctacaaacaaatttccagccaatcaggagcttcaaacgacaaccactactttggctacagcaccccttgggggtattttgactttaacagattccactgccacttttcaccacgtgactggcagcgactcattaacaacaactggggattccggcccaagaaactcaacttcaagctctttaacatccaggtcaaggaggtcacgcagaatgaaggcaccaagaccatcgccaataacctcaccagcaccatccaggtgtttacggactcggagtaccagctgccgtacgttctcggctctgcccaccagggctgcctgcctccgttcccggcggacgtgttcatgattccccagtacggctacctaacactcaacaacggtagtcaggccgtgggacgctcctccttctactgcctggaatactttccttcgcagatgctgagaaccggcaacaacttccagtttacttacaccttcgaggacgtgcctttccacagcagctacgcccacagccagagcttggaccggctgatgaatcctctgattgaccagtacctgtattacttgtctcggactcaaacaacaggaggcacgacaaatacgcagactctgggcttcagccaaggtgggcctaatacaatggccaatcaggcaaagaactggctgcctggaccctgttaccgccagcagcgagtatcaaagacatctgcggataacaacaacagtgaatactcgtggactggagctaccaagtaccacctcaatggcagagactctctggtgaatccgggcccggccatggcaagccacaaggacgatgaagaaaagttttttcctcagagcggggttctcatctttgggaagcaaggctcagagaaaacaaatgtggacattgaaaaggttatgattacagacgaagaggaaatcaggacaaccaatcccgtggctacggagcagtatggttctgtatctaccaacctccagagaggcaacagacaagcagctaccgcagatgtcaacacacagggcgttcttccaggcatggtctggcaggacagagatgtgtaccttcagggtcccatttgggccaaaattcctcacacagatggacactttcacccgtcccctcttatgggcggctttggactcaagaacccgcctcctcagatcctcatcaaaaacacgcctgttcctgcgaatcctccggcagagttttcagctacaaagtttgcttcattcatcacccaatactccacaggacaagtgagtgtggaaattgaatgggagctgcagaaagaaaacagcaagcgctggaatcccgaagtgcagtacacatccaattatgcaaaatctgccaacgttgattttactgtggacactaatggcgtgtattcagagcctcgccccattggcaccagatacctcacccgtaatctgtaa

SEQ ID NO: 390 - protein, 735 aa, Artificial Sequence
  source: /note="Description of Artificial Sequence: Synthetic polypeptide"
MAADGYLPDWLEDNLSEGIREWWALKPGAPKPKANQQKQDDGRGLVLPGYKYLGPFNGLDKGEPVNAADAAALEHDKAYDQQLQAGDNPYLRYNHADAEFQERLQEDTSFGGNLGRAVFQAKKRVLEPFGLVEEGAKTAPGKKRPVEQSPQEPDSSSGIGKTGQQPAKKRLNFGQTGDSESVPDPQPLGEPPAAPTSLGSNTMASGGGAPMADNNEGADGVGNSSGNWHCDSTWMGDRVITTSTRTWALPTYNNHLYKQISSQSGASNDNHYFGYSTPWGYFDFNRFHCHFSPRDWQRLINNNWGFRPKKLNFKLFNIQVKEVTQNEGTKTIANNLTSTIQVFTDSEYQLPYVLGSAHQGCLPPFPADVFMIPQYGYLTLNNGSQAVGRSSFYCLEYFPSQMLRTGNNFQFTYTFEDVPFHSSYAHSQSLDRLMNPLIDQYLYYLSRTQTTGGTTNTQTLGFSQGGPNTMANQAKNWLPGPCYRQQRVSKTSADNNNSEYSWTGATKYHLNGRDSLVNPGPAMASHKDDEEKFFPQSGVLIFGKQGSEKTNVDIEKVMITDEEEIRTTNPVATEQYGSVSTNLQRGNRQAATADVNTQGVLPGMVWQDRDVYLQGPIWAKIPHTDGHFHPSPLMGGFGLKNPPPQILIKNTPVPANPPAEFSATKFASFITQYSTGQVSVEIEWELQKENSKRWNPEVQYTSNYAKSANVDFTVDTNGVYSEPRPIGTRYLTRNL

SEQ ID NO: 391 - DNA, 2214 bp, Artificial Sequence; identical to SEQ ID NO: 381
  source: /note="Description of Artificial Sequence: Synthetic polynucleotide"

SEQ ID NO: 392 - protein, 737 aa, Artificial Sequence; identical to SEQ ID NO: 382
  source: /note="Description of Artificial Sequence: Synthetic polypeptide"

SEQ ID NO: 393 - DNA, 2196 bp, Artificial Sequence
  source: /note="Description of Artificial Sequence: Synthetic polynucleotide"
atggctgctgacggttatcttccagattggctcgaggacaacctctctgagggcattcgcgagtggtgggcgctgaaacctggagccccgcaacccaaagccaaccagcaaaagcaggacgacggccggggtctggtgcttcctggctacaagtacctcggacccttcaacggactcgacaagggggagcccgtcaacgaggcggacgccgcggccctcgagcacgacaaggcctacgaccagcagctcaaagcgggtgacaatccgtacctgcggtataatcacgccgacgccgagtttcaagagcgtctgcaagaagatacgtcctttgggggcaacctcgggcgagcagtcttccaggccaaaaagagggtactcgagcctctgggtctggttgaggaaggcgctaagacggctcctggaaagaagcggccagtagaaccggactccagctcgggcatcggcaagtcaggccagcagcccgcgaaaaagagactgaattttgggcagactggcgactcagagtcagtgcctgacccccaacctctctcagaaccacccgcaggtccctctggtctgggatctggtacaatggctgctggcggtggcgctccaatggcagacaataacgaaggcgccgacggagtgggtaatgtctcaggaaattggcattgcgattccacatggctgggcgaccgagtcatcaccaccagcactcggacctgggccctccccacctacaacaaccacctctacaagcaaatctccaacgggacctcgggaggcagcagcaacgacaacacctactttggctacagcaccccctgggggtattttgactttaacagattccactgccacttttcaccacgtgactggcagcgactcatcaacaacaactgggggttccggcccaagaagctcaacttcaagctcttcaacatccaggtcaaggaggtcacccagaatgaaggcaccaagaccatcgccaataacctcaccagcacggtgcaggtctttacggactcggagtaccagctcccgtacgtgctcggctctgcccaccagggctgcctgcctccgttcccggcggacgtgttcatgattccgcagtacgggtacctgacgctgaacaacgggagccaggccgtggggcgatcctccttctactgcctggagtactttccctcgcagatgctgagaacgggcaacaactttaccttcagctacaccttcgaggacgtgcccttccacagcagctacgcgcacagccagagcctggaccggctgatgaacccgctgattgaccagtacctgtactacctgtctcggactcagaccaacgggaccaatgccacgcagactctgttgtttgctcaggccgggcctcagaacatgtcggctcaggccaagaactggctgcctggtccttgctatcggcagcagcgcgtctctacgacagtgtcgcaaaacaacaacagcaactttacctggaccggggcgaccaagtaccacctgaacggccgagactccctggtgagccccggtgtcgccatggcaacgcacaaggacgacgaggagcgcttcttcccgagcagcggggtcctgatgtttggcaagcagggcgctggaaaggacaatgtcgagtacaccaacgtgatgctcaccagcgaggaggagatcaagaccaccaaccctgtggccacggagcagtacggcgtggtggctgacaatctgcagcagaccaactcagctcccattgtgggggcagtcaacagccagggggccttacccggtatggtctggcagaaccgggacgtgtacctgcagggtcccatctgggccaagatcccgcatacggacggcaactttcacccgtctcctctcatgggcggctttggactgaaacacccgcctccccagatcctgatcaaaaacacgccggtacctgcggatcccccggtgaactttacggacgctaagctggcgagtttcatcacgcagtacagcaccgggcaggtcagcgtggagattgagtgggagctgcagaaggagaacagcaagcgctggaatcccgagattcagtacacttccaattattataaatcagctaatgtggactttgccgtcaatgcagatggtgtatatagtgaaccccgccccattggcactcgttacctcacccgtaatctgtaa

SEQ ID NO: 394 - protein, 731 aa, Artificial Sequence
  source: /note="Description of Artificial Sequence: Synthetic polypeptide"
MAADGYLPDWLEDNLSEGIREWWALKPGAPQPKANQQKQDDGRGLVLPGYKYLGPFNGLDKGEPVNEADAAALEHDKAYDQQLKAGDNPYLRYNHADAEFQERLQEDTSFGGNLGRAVFQAKKRVLEPLGLVEEGAKTAPGKKRPVEPDSSSGIGKSGQQPAKKRLNFGQTGDSESVPDPQPLSEPPAGPSGLGSGTMAAGGGAPMADNNEGADGVGNVSGNWHCDSTWLGDRVITTSTRTWALPTYNNHLYKQISNGTSGGSSNDNTYFGYSTPWGYFDFNRFHCHFSPRDWQRLINNNWGFRPKKLNFKLFNIQVKEVTQNEGTKTIANNLTSTVQVFTDSEYQLPYVLGSAHQGCLPPFPADVFMIPQYGYLTLNNGSQAVGRSSFYCLEYFPSQMLRTGNNFTFSYTFEDVPFHSSYAHSQSLDRLMNPLIDQYLYYLSRTQTNGTNATQTLLFAQAGPQNMSAQAKNWLPGPCYRQQRVSTTVSQNNNSNFTWTGATKYHLNGRDSLVSPGVAMATHKDDEERFFPSSGVLMFGKQGAGKDNVEYTNVMLTSEEEIKTTNPVATEQYGVVADNLQQTNSAPIVGAVNSQGALPGMVWQNRDVYLQGPIWAKIPHTDGNFHPSPLMGGFGLKHPPPQILIKNTPVPADPPVNFTDAKLASFITQYSTGQVSVEIEWELQKENSKRWNPEIQYTSNYYKSANVDFAVNADGVYSEPRPIGTRYLTRNL

SEQ ID NO: 395 - DNA, 2196 bp, Artificial Sequence
  source: /note="Description of Artificial Sequence: Synthetic polynucleotide"
atggctgctgacggttatcttccagattggctcgaggacaacctctctgagggcattcgcgagtggtgggcgctgaaacctggagccccgcaacccaaagccaaccagcaaaagcaggacgacggccggggtctggtgcttcctggctacaagtacctcggacccttcaacggactcgacaagggggagcccgtcaacgaggcggacgccgcggccctcgagcacgacaaggcctacgaccagcagctcaaagcgggtgacaatccgtacctgcggtataatcacgccgacgccgagtttcaagagcgtctgcaagaagatacgtcctttgggggcaacctcgggcgagcagtcttccaggccaaaaagagggtactcgagcctctgggtctggttgaggaaggcgctaagacggctcctggaaagaagcggccagtagaaccggactccagctcgggcatcggcaagtcaggccggcagcccgcgaaaaagagactgaattttgggcagactggcgactcagagtcagtgcctgacccccaacctctctcagaaccacccgcaggtccctctggtctgggatctggtacaatggctgcaggcggtggcgctccaatggcagacaataacgaaggcgccgacggagtgggtaatgcctcaggaaattggcattgcgattccacatggctgggcgaccgagtcatcaccaccagcactcggacctgggccctccccacctacaacaaccacctctacaagcaaatctccaacgggacctcgggaggcagcagcaacgacaacacctactttggctacagcaccccctgggggtattttgactttaacagattccactgccacttttcaccacgtgactggcagcgactcatcaacaacaactggggattccggcccaagaggctcaacttcaagctcttcaacatccaggtcaaggaggtcacccagaatgaaggcaccaagaccatcgccaataacctcaccagcacggtgcaggtctttacggactcgaagtaccagctcccgtacgtgctcggctctgcccaccagggctgcctgcctccgttcccggcggacgtgttcatgattccgcagtacgggtacctgacgctgaacaacgggagccaggccgtggggcgatcctccttctactgcctggagtactttccctcgcagatgctgagaacgggcaacaactttaccttcagctacaccttcgaggacgtgcccttccacagcagctacgcgcacagccagagcctggaccggctgatgaacccgctgattgaccagtacctgtactacctgtctcggactcagaccaacgggaccaatgccacgcagactctgttgtttgctcaggccgggcctcagaacatgtcggctcaggccaagaactggctgcctggtccttgctatcggcagcagcgcgtctctacgacagtgtcgcaaaacaacaacagcaactttacctggaccggggcgaccaagtaccacctgaacggccgagactccctggtgaaccccggtgtcgccatggcaacgcacaaggacgacgaggagcgcttcttcccgagcagcggggtcctgatgtttggcaagcagggcgctggaaaggacaatgtcgagtacaccaacgtgatgctcaccagcgaggaggagatcaagaccaccaaccctgtggccacggagcagtacggtgtggtggctgacaatctgcagcagaccaactcggctcccattgtgggggcagtcaacagccagggggccttacccggtatggtctggcagaaccgggacgtgtacctgcagggtcccatctgggccaagatcccgcatacggacggcaactttcacccgtctcctctcatgggcggctttggactgaaacacccgcctccccagatcctgatcaaaaacacgccggtacctgcggatcccccggtgaactttacggacgctaagctggcgagtttcatcacgcagtacagcaccgggcaggtcagcgtggagattgagtgggagctgcagaaggagaacagcaagcgctggaatcccgagattcagtacacttccaattattataaatcagctaatgtggactttgccgtcaatgcagatggtgtatatagtgaaccccgccccattggcactcgttacctcacccgtaatctgtaa

SEQ ID NO: 396 - protein, 731 aa, Artificial Sequence
  source: /note="Description of Artificial Sequence: Synthetic polypeptide"
MAADGYLPDWLEDNLSEGIREWWALKPGAPQPKANQQKQDDGRGLVLPGYKYLGPFNGLDKGEPVNEADAAALEHDKAYDQQLKAGDNPYLRYNHADAEFQERLQEDTSFGGNLGRAVFQAKKRVLEPLGLVEEGAKTAPGKKRPVEPDSSSGIGKSGRQPAKKRLNFGQTGDSESVPDPQPLSEPPAGPSGLGSGTMAAGGGAPMADNNEGADGVGNASGNWHCDSTWLGDRVITTSTRTWALPTYNNHLYKQISNGTSGGSSNDNTYFGYSTPWGYFDFNRFHCHFSPRDWQRLINNNWGFRPKRLNFKLFNIQVKEVTQNEGTKTIANNLTSTVQVFTDSKYQLPYVLGSAHQGCLPPFPADVFMIPQYGYLTLNNGSQAVGRSSFYCLEYFPSQMLRTGNNFTFSYTFEDVPFHSSYAHSQSLDRLMNPLIDQYLYYLSRTQTNGTNATQTLLFAQAGPQNMSAQAKNWLPGPCYRQQRVSTTVSQNNNSNFTWTGATKYHLNGRDSLVNPGVAMATHKDDEERFFPSSGVLMFGKQGAGKDNVEYTNVMLTSEEEIKTTNPVATEQYGVVADNLQQTNSAPIVGAVNSQGALPGMVWQNRDVYLQGPIWAKIPHTDGNFHPSPLMGGFGLKHPPPQILIKNTPVPADPPVNFTDAKLASFITQYSTGQVSVEIEWELQKENSKRWNPEIQYTSNYYKSANVDFAVNADGVYSEPRPIGTRYLTRNL

SEQ ID NO: 397 - DNA, 2196 bp, Artificial Sequence
  source: /note="Description of Artificial Sequence: Synthetic polynucleotide"
atggctgctgacggttatcttccagattggctcgaggacaacctctctgagggcattcgcgagtggtgggcgctgaaacctggagccccgcaacccaaagccaaccagcaaaagcaggacgacggccggggtctggtgcttcctggctacaagtacctcggacccttcaacggactcgacaagggggagcccgtcaacgaggcggacgccgcggccctcgagcacgacaaggcctacgaccagcagctcaaagcgggtgacaatccgtacctgcggtataatcacgccgacgccgagtttcaagagcgtctgcaagaagatacgtcctttgggggcaacctcgggcgagcagtcttccaggccaaaaagagggtactcgagcctctgggtctggttgaggaaggcgctaagacggctcctggaaagaagcggccagtagaaccggactccagctcgggcatcggcaagtcaggccagcagcccgcgaaaaagagactgaattttgggccgactggcgactcagagtcagtgcctgacccccaacctctctcagaaccacctgcaggtccctctggtctgggatctggtacaatggctgcaggcggtggcgctccaatggcagacaataacgaaggcgccgacggagtgggtaatgtctcaggaaattggcattgcgattccacatggctgggcgaccgagtcatcaccaccagcactcggacctgggccctccccacctacaacaaccacctctacaagcaaatctccaacgggacctcgggaggcagcagcaacgacaacacctactttggctacagcaccccctgggggtattttgactttaacagattccactgccacttttcaccacgcgactggcagcgactcatcaacaacaactggggattccggcccaagaagctcaacttcaagctcttcaacatccaggtcaaggaggtcacccagaatgaaggcaccaagaccaccgccaataacctcaccagcacggtgcaggtctttacggactcggagtaccagctcccgtacgtgctcggctctgcccaccagggctgcctgcctccgttcccggcggacgtgttcatgattccgcagtacgggtacctgacgctgaacaacgggagccaggccgtggggcgatcctccttctactgcctggagtactttccctcgcagatgctgagaacgggcaacaactttaccttcagctacaccttcgaggacgtgcccttccacagcagctacgcgcacagccagagcctggaccggctgatgaacccgctgattgaccagtacctgtactacctgtctcggactcagaccaacgggaccaatgccacgcagactctgttgtttgctcaggccgggcctcagaacatgtcggctcaggccaagaactggctgcctggtccttgctatcggcagcagcgcgtctctacggcagtgtcgcaaaacaacaacagcaactttacctggaccggggcgaccaagtaccacctgaacggccgagactccctggtgaaccccggtgtcgccatggcaacgcacaaggacgacgaggagcgcttcttcccgagcagcggggtcctgatgtttggcaagcagggcgctggaaaggacaatgtcgagtacaccaacgtgatgctcaccagcgaggaggagatcaagaccaccaaccctgtggccacggagcagtacggtgtggtggctgacaatctgcagcagaccaactcggctcccattgtgggggcagtcaacagccagggggccttacccggtatggtctggcagaaccgggacgtgtacctgcagggtcccatctgggccaagatcccgcatacggacggcaactttcacccgtctcctctcatgggcggctttggactgaaacacccgcctccccagatcctgatcaaaaacacgccggtacctgcggatcccccggtgaactttacggacgctaagctggcgagtttcatcacgcagtacagcaccgggcaggtcagcgtggagattgagtgggagctgcagaaggagaacagcaagcgctggaatcccgagattcagtacacttccaattattataaatcagctaatgtggactttgccgtcaatgcagatggtgtatatagcgaaccccgccccattggcactcgttacctcacccgtaatctgtaa

SEQ ID NO: 398 - protein, 731 aa, Artificial Sequence
  source: /note="Description of Artificial Sequence: Synthetic polypeptide"
MAADGYLPDWLEDNLSEGIREWWALKPGAPQPKANQQKQDDGRGLVLPGYKYLGPFNGLDKGEPVNEADAAALEHDKAYDQQLKAGDNPYLRYNHADAEFQERLQEDTSFGGNLGRAVFQAKKRVLEPLGLVEEGAKTAPGKKRPVEPDSSSGIGKSGQQPAKKRLNFGPTGDSESVPDPQPLSEPPAGPSGLGSGTMAAGGGAPMADNNEGADGVGNVSGNWHCDSTWLGDRVITTSTRTWALPTYNNHLYKQISNGTSGGSSNDNTYFGYSTPWGYFDFNRFHCHFSPRDWQRLINNNWGFRPKKLNFKLFNIQVKEVTQNEGTKTTANNLTSTVQVFTDSEYQLPYVLGSAHQGCLPPFPADVFMIPQYGYLTLNNGSQAVGRSSFYCLEYFPSQMLRTGNNFTFSYTFEDVPFHSSYAHSQSLDRLMNPLIDQYLYYLSRTQTNGTNATQTLLFAQAGPQNMSAQAKNWLPGPCYRQQRVSTAVSQNNNSNFTWTGATKYHLNGRDSLVNPGVAMATHKDDEERFFPSSGVLMFGKQGAGKDNVEYTNVMLTSEEEIKTTNPVATEQYGVVADNLQQTNSAPIVGAVNSQGALPGMVWQNRDVYLQGPIWAKIPHTDGNFHPSPLMGGFGLKHPPPQILIKNTPVPADPPVNFTDAKLASFITQYSTGQVSVEIEWELQKENSKRWNPEIQYTSNYYKSANVDFAVNADGVYSEPRPIGTRYLTRNL

SEQ ID NO: 399 - DNA, 4404 bp, Artificial Sequence
  source: /note="Description of Artificial Sequence: Synthetic polynucleotide"
atggctgccgatggttatcttccagattggctcgagggcaacctctctgagggcattcgcgagtggtgggacttgaaacctggagccccgaaacccaaagccaaccagcaaaagcaggacgacggccggggtctggtgcttcctggctacaggtacctcggacccttcaacggactcgacaagggagagccggtcaacgaggcagacgccgcggccctcgagcacgacaaggcctacgacaagcagctcgagcagggggacaacccgtacctcaagtacaaccacgccgacgccgagtttcaggagcgtcttcaagaagatacgtcttttgggggcaacctcgggcgagcagtcttccaggccaagaagcgggttctcgaacctctcggtctggttgaggaaggcgctaagacggctcctggaaagaagagacccatagaatcccccgactcctccacgggcatcggcaagaacggccagccgcccgctaaaaagaagctcaactttgggcagactggcgactcagagtcagtgcccgacccccaacctctcggagaacctcccgccgcgccctcaggtctgggatctggtacaatggctgcaggcggtggcgcaccaatggcagacaataacgaaggcgccgacggagtgggtaatgcctccggaaattggcattgcgattccacatggctgggcgacagagtcatcaccaccagcacccgcacctgggccctgcccacctacaacaaccacctctacaagcagatatcaagtcagagcggggctaccaacgacaaccacttcttcggctacagcaccccctggggctattttgacttcaacagattccactgccacttctcaccacgtgactggcagcgactcatcaacaacaactggggattccggcccagaaagctgcggttcaagttgttcaacatccaggtcaaggaggtcacgacgaacgacggcgttacgaccatcgctaataaccttaccagcacgattcaggtcttctcggactcggagtaccaactgccgtacgtcctcggctctgcgcaccagggctgcctccctccgttccctgcggacgtgttcatgattcctcagtacggatatctgactctaaacaacggcagtcagtctgtgggacgttcctccttctactgcctggagtactttccttctcagatgctgagaacgggcgataactttgaattcagctacacctttgaggaagtgcctttccacagcagctatgcgcacagccagagcctggaccggctgatgaatcccctcatcgaccagtacctgtactacctggcccggacccagagcactacggggtccacaagggagctgcagttccatcaggctgggcccaacaccatggccgagcaatcaaagaactggctgcccggaccctgttatcggcagcagagactgtcaaaaaacatagacagcaacaacaacagtaactttgcctggaccggggccactaaataccatctgaatggtagaaattcattaaccaacccgggcgtagccatggccaccaacaaggacgacgaggaccagttctttcccatcaacggagtgctggtttttggcaaaacgggggctgccaacaagacaacgctggaaaacgtgctaatgaccagcgaggaggagatcaaaaccaccaatcccgtggctacagaagaatacggtgtggtctccagcaacctgcaatcgtctacggccggaccccagacacagactgtcaacagccagggggctctgcccggcatggtctggcagaaccgggacgtgtacctgcagggtcccatctgggccaaaattcctcacacggacggcaactttcacccgtctcccctgatgggcggatttggactcaaacacccgcctcctcaaattctcatcaaaaacaccccggtacctgctaatcctccagaggtgtttactcctgccaagtttgcctcatttatcacgcagtacagcaccggccaggtcagcgtggagatcgagtgggaactgcagaaagaaaacagcaaacgctggaatccagagattcagtacacctcaaattatgccaagtctaataatgtggaatttgctgtcaacaacgaaggggtttatactgagcctcgccccattggcacccgttacctcacccgtaacctgtaaatggctgccgatggttatcttccagattggctcgaggacaacctctctgagggcattcgcgagtggtgggacttgaaacctggagccccgaaacccaaagccaaccagcaaaagcaggacgacggccggggtctggtgcttcctggctacaagtacctcggacccttcaacggactcgacaagggggagcccgtcaacgcggcggacgcagcggccctcgagcacgacaaggcctacgaccagcagctcaaagcgggtgacaatccgtacctgcggtataaccacgccgacgccgagtttcaggagcgtctgcaagaagatacgtcttttgggggcaacctcgggcgagcagtcttccaggccaagaagcgggttctcgaacctctcggtctggttgaggaaggcgctaagacggctcctggaaagaagagaccggtagagccatcaccccagcgttctccagactcctctacgggcatcggcaagaaaggccagcagcccgcgaaaaagagactcaactttgggcagactggcgactcagagtcagtgcccgaccctcaaccaatcggagaaccccccgcaggcccctctggtctgggatctggtacaatggctgcaggcggtggcgctccaatggcagacaataacgaaggcgccgacggagtgggtagttcctcaggaaattggcattgcgattccacatggctgggcgacagagtcatcaccaccagcacccgaacctgggccctccccacctacaacaaccacctctacaagcaaatctccaacgggacttcgggaggaagcaccaacgacaacacctacttcggctacagcaccccctgggggtattttgactttaacagattccactgccacttctcaccacgtgactggcagcgactcatcaacaacaactggggattccggcccaagagactcaacttcaagctcttcaacatccaggtcaaggaggtcacgcagaatgaaggcaccaagaccatcgccaataaccttaccagcacgattcaggtctttacggactcggaataccagctcccgtacgtcctcggctctgcgcaccagggctgcctgcctccgttcccggcggacgtcttcatgattcctcagtacgggtacctgactctgaacaatggcagtcaggccgtgggccgttcctccttctactgcctggagtactttccttctcaaatgctgagaacgggcaacaactttgagttcagctaccagtttgaggacgtgccttttcacagcagctacgcgcacagccaaagcctggaccggctgatgaaccccctcatcgaccagtacctgtactacctgtctcggactcagtccacgggaggtaccgcaggaactcagcagttgctattttctcaggccgggcctaataacatgtcggctcaggccaaaaactggctacccgggccctgctaccggcagcaacgcgtctccacgacactgtcgcaaaataacaacagcaactttgcctggaccggtgccaccaagtatcatctgaatggcagagactctctggtaaatcccggtgtcgctatggcaacccacaaggacgacgaagagcgattttttccgtccagcggagtcttaatgtttgggaaacagggagctggaaaagacaacgtggactatagcagcgttatgctaaccagtgaggaagaaattaaaaccaccaacccagtggccacagaacagtacggcgtggtggccgataacctgcaacagcaaaacgccgctcctattgtaggggccgtcaacagtcaaggagccttacctggcatggtctggcagaaccgggacgtgtacctgcagggtcctatctgggccaagattcctcacacggacggaaactttcatccctcgccgctgatgggaggctttggactgaaacacccgcctcctcagatcctgattaagaatacacctgttcccgcggatcctccaactaccttcagtcaagctaagctggcgtcgttcatcacgcagtacagcaccggacaggtcagcgtggaaattgaatgggagctgcagaaagaaaacagcaaacgctggaacccagagattcaatacacttccaactactacaaatctacaaatgtggactttgctgttaacacagatggcacttattctgagcctcgccccatcggcacccgttacctcacccgtaatctgtaa

SEQ ID NO: 400 - protein, 738 aa, Artificial Sequence; identical to SEQ ID NO: 18
  source: /note="Description of Artificial Sequence: Synthetic polypeptide"

SEQ ID NO: 401 - DNA, 3129 bp, Artificial Sequence
  source: /note="Description of Artificial Sequence: Synthetic polynucleotide"
gaattcgccctttctacggctgcgtcaactggaccaatgagaactttcccttcaacgattgcgtcgacaagatggtgatctggtgggaggagggcaagatgacggccaaggtcgtggagtccgccaaggccattctcggcggcagcaaagtgcgcgtggaccaaaagtgcaagtcgtccgcccagatcgaccccacccccgtgatcgtcacctccaacaccaacatgtgcgccgtgattgacgggaacagcaccaccttcgagcaccagcagccgttgcaggaccggatgttcaagtttgaactcacccgccgtctggagcacgactttggcaaggtgacaaagcaggaagtcagagagttcttccgctgggcgcaggatcacgtgaccgaggtggcgcacgagttctacgtcagaaagggtggagccaacaagagacccgcccccgatgacgcggataaaagcgagcccaagcgggcctgcccctcagtcgcggatccatcgacgtcagacgcggaaggagctccggtggactttgccgacaggtaccaaaacaaatgttctcgtcacgcgggcatgcttcagatgctgtttccctgcaaaacatgcgagagaatgaatcagaatttcaacatttgcttcacgcacgggaccagagactgttcagaatgtttccccggcgtgtcagaatctcaaccggtcgtcagaaaaaagacgtatcggaaactctgtgcgattcatcatctgctgggggcgggcacccgagattgcttgctcggcctgcgatctggtcaacgtggacctagatgactgtgtttctgagcaataaatgacttaaaccaggtatggctgccgatggttatcttccagattggctcgaggacaacctctctgagggcattcgcgagtggtgggacttgaaacctggagccccgaaacccaaagccaaccagcaaaagcaggacgacggccggggtctggtgcttcctggctacaagtacctcggacccttcaacggactcgacaagggggagcccgtcaacgcggcggacgcagcggccctcgagcacgacaaggcctacgaccagcagctcaaagcgggtgacaatccgtacctgcggtataaccacgccgacgccgagtttcaggagcgtctgcaagaagatacgtcttttgggggcaacctcgggcgagcagtcttccaggccaagaagcgggttctcgaacctctcggtctggttgaggaaggcgctaagacggctcctggaaagaagagaccggtagagccatcaccccagcgttctccagactcctctacgggcatcggcaagaaaggccagcagcccgcgaaaaagagactcaactttgggcagactggcgactcagagtcagtgcccgaccctcaaccaatcggagaaccccccgcaggcccctctggtctgggatctggtacaatggctgcaggcggtggcgctccaatggcagacaataacgaaggcgccgacggagtgggtagttcctcaggaaattggcattgcgattccacatggctgggcgacagagtcatcaccaccagcacccgaacctgggccctccccacctacaacaaccacctctacaagcaaatctccaacgggacttcgggaggaagcaccaacgacaacacctacttcggctacagcaccccctgggggtattttgactttaacagattccactgccacttctcaccacgtgactggcagcgactcatcaacaacaactggggattccggcccaagagactcaacttcaagctcttcaacatccaggtcaaggaggtcacgcagaatgaaggcaccaagaccatcgccaataaccttaccagcacgattcaggtctttacggactcggaataccagctcccgtacgtcctcggctctgcgcaccagggctgcctgcctccgttcccggcggacgtcttcatgattcctcagtacgggtacctgactctgaacaatggcagtcaggccgtgggccgttcctccttctactgcctggagtactttccttctcaaatgctgagaacgggcaacaactttgagttcagctaccagtttgaggacgtgccttttcacagcagctacgcgcacagccaaagcctggaccggctgatgaaccccctcatcgaccagtacctgtactacctgtctcggactcagtccacgggaggtaccgcaggaactcagcagttgctattttctcaggccgggcctaataacatgtcggctcaggccaaaaactggctacccgggccctgctaccggcagcaacgcgtctccacgacactgtcgcaaaataacaacagcaactttgcctggaccggtgccaccaagtatcatctgaatggcagagactctctggtaaatcccggtgtcgctatggcaacccacaaggacgacgaagagcgattttttccgtccagcggagtcttaatgtttgggaaacagggagctggaaaagacaacgtggactatagcagcgttatgctaaccagtgaggaagaaattaaaaccaccaacccagtggccacagaacagtacggcgtggtggccgataacctgcaacagcaaaacgccgctcctattgtaggggccgtcaacagtcaaggagccttacctggcatggtctggcagaaccgggacgtgtacctgcagggtcctatctgggccaagattcctcacacggacggaaactttcatccctcgccgctgatgggaggctttggactgaaacacccgcctcctcagatcctgattaagaatacacctgttcccgcggatcctccaactaccttcagtcaagctaagctggcgtcgttcatcacgcagtacagcaccggacaggtcagcgtggaaattgaatgggagctgcagaaagaaaacagcaaacgctggaacccagagattcaatacacttccaactactacaaatctacaaatgtggactttgctgttaacacagatggcacttattctgagcctcgccccatcggcacccgttacctcacccgtaatctgtaattgcttgttaatcaataaaccggttgattcgtttcagttgaactttggtctctgcgaagggcgaattc

SEQ ID NO: 402 - protein, 738 aa, Artificial Sequence; identical to SEQ ID NO: 18
  source: /note="Description of Artificial Sequence: Synthetic polypeptide"

SEQ ID NO: 403 - protein, 733 aa, Artificial Sequence
  source: /note="Description of Artificial Sequence: Synthetic polypeptide"
MAADGYLPDWLEDNLSEGIREWWDLRPGAPKPKANQQKQDDGRGLVLPGYKYLGPFNGLDKGEPVNEADAAALEHDKAYDKQLEQGDNPYLKYNHADAEFQERLQEDTSFGGNLGRAVFQAKKRVLEPLGLVEEGAKTAPGKKRPIESPDSSTGIGKKGQQPAKKRLNFGQTGDSESVPDPQPIGEPPAGPSGLGSGTMAAGGGAPMADNNEGADGVGSSSGNWHCDSTWLGDRVITTSTRTWALPTYNNHLYKQISNGTSGGSTNDNTYFGYSTPWGYFDFNRFHCHFSPRDWQRLINNNWGFRPKRLNFKLFNIQVKEVTQNEGTKTIANNLTSTIQVFTDSEYQLPYVLGSAHQGCLPPFPADVFMIPQYGYLTLNNGSQAVGRSSFYCLEYFPSQMLRTGNNFEFSYQFEDVPFHSSYAHSQSLDRLMNPLIDQYLYYLSRTQSTGGTAGTQQLLFSQAGPNNMSAQAKNWLPGPCYRQQRVSTTVSQNNNSNFAWTGATKYHLNGRDSLVNPGVAMATHKGDEERFFPSSGVLMFGKQGAGKDNVDYSSVMLTSEEEIKTTNPVATEQYGVVADNLQQQNAAPIVGAVNSQGALPGMVWQNRDVYLQGPIWAKIPHTDGNFHPSPLMGGFGLKHPPPQILIKNTPVPADPPTTFSQAKLASFITQYSTGQVSVEIEWELQKENSKRWNPEIQYTSNYYKSTNVDFAVNTEGTYSEPRPIGTRYLTRNL

SEQ ID NO: 404 - DNA, 2501 bp, Artificial Sequence
  source: /note="Description of Artificial Sequence: Synthetic polynucleotide"
gaattcgcccttggctgcgtcaactggaccaatgagaactttcccttcaacgattgcgtcgacaagatggtgatctggtgggaggagggcaagatgacggccaaggtcgtggagtccgccaaggccattcatcatctgctggggcgggctcccgagattgcttgctcggcctgcgatctggtcaacgtggacctggatgactgtgtttctgagcaataaatgacttaaaccaggtatggctgccgatggttatcttccagattggctcgaggacaacctctctgagggcattcgcgagtggtgggacttgagacctggagccccgaaacccaaagccaaccagcaaaagcaggacgacggccggggtctggtgcttcctggctacaagtacctcggacccttcaacggactcgacaagggagagccggtcaacgaggcagacgccgcggccctcgagcacgacaaggcctacgacaagcagctcgagcagggggacaacccgtacctcaagtacaaccacgccgacgccgagtttcaggagcgtcttcaagaagatacgtcttttgggggcaacctcgggcgagcagtcttccaggccaagaagcgggttctcgaacctctcggtctggttgaggaaggcgctaagacggctcctggaaagaagagacccatagaatcccccgactcctccacgggcatcggcaagaaaggccagcagcccgctaaaaagagactcaactttgggcagactggcgactcagagtcagtgcccgaccctcaaccaatcggagaaccccccgcaggcccctctggtctgggatctggcacaatggctgcaggcggtggcgctccaatggcagacaataacgaaggcgccgacggagtgggtagttcctcaggaaattggcattgcgattccacatggctgggcgacagagtcatcaccaccagcacccgaacctgggccctccccacctacaacaaccacctctacaagcaaatctccaacgggacatcgggaggaagcaccaacgacaacacctacttcggctacagcaccccctgggggtattttgactttaacagattccactgccacttctcaccacgtgactggcagcgactcatcaacaacaactggggattccggcccaagagactcaacttcaagctcttcaacatccaggtcaaggaggtcacgcagaatgaaggcaccaagaccatcgccaataaccttaccagcacgattcaggtctttacggactcggaataccagctcccgtacgtcctcggctctgcgcaccagggctgcctgcctccgttcccggcggacgtcttcatgattcctcagtacgggtacctgactctgaacaacggcagtcaggccgtgggccgttcctccttctactgcctggagtactttccttctcaaatgctgagaacgggcaacaactttgagttcagctaccagtttgaggacgtgccttttcacagcagctatgcgcacagccaaagcctggaccggctgatgaaccccctcatcgaccagtacctgtactacctgtctcggactcagtccacgggaggtaccgcaggaactcagcagttgctattttctcaggccgggcctaataacatgtcggctcaggccaaaaactggctacccgggccctgctaccggcagcaacgcgtctccacgacagtgtcgcaaaataacaacagcaactttgcttggaccggtgccaccaagtatcatctgaatggcagagactctctggtaaatcccggtgtcgctatggcaacgcacaagggcgacgaagagcgattttttccatccagcggagtcttgatgtttgggaaacagggagctggaaaagacaacgtagactatagcagcgttatgctaaccagtgaggaagaaatcaaaaccaccaacccagtggccacagaacagtacggcgtggtggccgataacctgcaacagcaaaacgccgctcctattgtaggggccgtcaacagtcaaggagccttacctggcatggtctggcagaaccgggacgtgtacctgcagggtcctatctgggccaagattcctcacacggacggcaactttcatccttcgccgctgatgggaggctttggactgaaacacccgcctcctcagatcctgattaagaatacacctgttcccgcggatcctccaactaccttcagtcaagccaagctggcgtcgttcatcacgcagtacagcaccggacaggtcagcgtggaaattgaatgggagctgcagaaagagaacagcaagcgctggaacccagagattcagtatacttccaactactacaaatctacaaatgtggactttgctgtcaatactgagggtacttattcagagcctcgccccattggcacccgttacctcacccgtaacctgtaattgcctgttaatcaataaaccggttgattcgtttcagttgaactttggtctcaagggcgaattc

SEQ ID NO: 405 - DNA, 2187 bp, Artificial Sequence
  source: /note="Description of Artificial Sequence: Synthetic polynucleotide"
atggctgccgatggttatcttccagattggctcgaggacaacctctctgagggcattcgcgagtggtgggacttgaaacctggagccccgaaacccaaagccaaccagcaaaagcaggacgacggccggggtctggtgcttcctggctacaagtacctcggacccttcaacggactcgacaagggagagccggtcaacgaggcagacgccgcggccctcgagcacgacaaggcctacgacaagcagctcgagcagggggacaacccgtacctcaagtacaaccacgccgacgccgagtttcaggagcgtcttcaagaagatacgtcttttgggggcaacctcgggcgagcagtcttccaggccaagaagcgggttctcgaacctctcggtctggttgaggaaggcgctaagacggctcctggaaagaagagacccatagaatcccccgactcctccacgggcatcggcaagaaaggccagcagcccgctaaaaagaagctcaactttgggcagactggcgactcagagtcagtgcccgacccccaacctctcggagaacctcccgccgcgccctcaggtctgggatctggtacaatggctgcaggcggtggcgcaccaatggcagacaataacgaaggcgccgacggagtgggtaatgcctccggaaattggcattgcgattccacatggctgggcgacagagtcatcaccaccagcacccgcacctgggccctgcccacctacaacaaccacctctacaagcagatatcaagtcagagcggggctaccaacgacaaccacttcttcggctacagcaccccctggggctattttgacttcaacagattccactgccacttctcaccacgtgactggcagcgactcatcaacaacaactggggattccggcccagaaagctgcggttcaagttgttcaacatccaggtcaaggaggtcacgacgaacgacggcgttacgaccatcgctaataaccttaccagcacgattcaggtcttctcggactcggagtaccaactgccgtacgtcctcggctctgcgcaccagggctgcctccctccgttccctgcggacgtgttcatgattcctcagtacggatatctgactctaaacaacggcagtcagtctgtgggacgttcctccttctactgcctggagtactttccttctcagatgctgagaacgggcaataactttgaattcagctacacctttgaggaagtgcctttccacagcagctatgcgcacagccagagcctggaccggctgatgaatcccctcatcgaccagtacctgtactacctggcccggacccagagcactacggggtccacaagggagctgcagttccatcaggctgggcccaacaccatggccgagcaatcaaagaactggctgcccggaccctgttatcggcagcagagactgtcaaaaaacatagacagcaacaacaacagtaactttgcctggaccggggccactaaataccatctgaatggtagaaattcattaaccaacccgggcgtagccatggccaccaacaaggacgacgaggaccagttctttcccatcaacggagtgctggtttttggcgaaacgggggctgccaacaagacaacgctggaaaacgtgctaatgaccagcgaggaggagatcaaaaccaccaatcccgtggctacagaagaatacggtgtggtctccagcaacctgcaatcgtctacggccggaccccagacacagactgtcaacagccagggggctctgcccggcatggtctggcagaaccgggacgtgtacctgcagggtcccatctgggccaaaattcctcacacggacggcaactttcacccgtctcccctgatgggcggatttggactcaaacacccgcctcctcaaattctcatcaaaaacaccccggtacctgctaatcctccagaggtgtttactcctgccaagtttgcctcatttatcacgcagtacagcaccggccaggtcagcgtggagatcgagtgggaactgcagaaagaaaacagcaaacgctggaatccagagattcagtacacctcaaattatgccaagtctaataatgtggaatttgctgtcaacaacgaaggggtttatactgagcctcgccccattggcacccgttacctcacccgtaacctgtaa

SEQ ID NO: 406 - protein, 728 aa, Artificial Sequence; identical to SEQ ID NO: 74
  source: /note="Description of Artificial Sequence: Synthetic polypeptide"

SEQ ID NO: 407 - protein, 728 aa, Artificial Sequence; identical to SEQ ID NO: 166
  source: /note="Description of Artificial Sequence: Synthetic polypeptide"

SEQ ID NO: 408 - protein, 728 aa, Artificial Sequence; identical to SEQ ID NO: 166
  source: /note="Description of Artificial Sequence: Synthetic polypeptide"

SEQ ID NO: 409 - protein, 733 aa, Artificial Sequence
  source: /note="Description of Artificial Sequence: Synthetic polypeptide"
MAADGHLPDWLEDNLSEGIREWWDLKPGAPKPKANQQKQDDGRGLVLPGYKYLGPFNGLDKGEPVNAADAAALEHDKAYDQQLKAGDNPYLRYNHADAEFQERLQEDTSFGGNLGRAVFQAKKRVLEPLGLVEEGAKTAPGKKRPIESPDSSTGIGKKGQQPAKKKLNFGQTGDSESVPDPQPIGEPPAGPSGLGSGTMAAGGGAPMADNNEGADGVGSSSGNWHCDSTWLGDRVITTSTRTWALPTYNNHLYKQISNGTSGGSTNDNTYFGYSTPWGYFDFNRFHCHFSPRDWQRLINNSWGFRPKRLNFKLFNIQVKEVTQNEGTKTIANNLTSTIQVFTDSEYQLPYVLGSAHQGCLPPFPADVFMIPQYGYLTLNNGSQAVGRSSFYCLEYFPSQMLRTGNNFEFSYQFEDVPFHSSYAHSQSLDRLMNPLIDQYLYYLSRTQSTGGTAGTQQLLFSQAGPNNMSAQAKNWLPGPCYRQQRVSTTLSQNNNSNFAWTGATKYHLNGRDSLVNPGVAMATHKDDEERFFPSSGVLMFGKQGAGKDNVDYSSVMLTSEEEIKTTNPVATEQYGVVADNLQQQNAAPIVGAVNSQGALPGMVWQNRDVYLQGPIWAKIPHTDGNFHPSPLMGGFGLKHPPPQILIKNTPVPADPPTTFSQAKLASFITQYSTGQVSVEIEWELQKENSKRWNPEIQYTSNYYKSTNVDFAVNTEGTYSEPRPIGTRYLTRNL

SEQ ID NO: 410 - DNA, 3113 bp, Artificial Sequence
  source: /note="Description of Artificial Sequence: Synthetic polynucleotide"
gaattcgccctttctacggctgcgtcaactggaccaatgagaactttcccttcaacgattgcgtcgacaagatggtgatctggtgggaggagggcaagatgacggccaaggtcgtggagtccgccaaggccattctcggcggcagcaaggtgcgcgtggaccaaaagtgcaagtcgtccgcccagatcgatcccacccccgtgatcgtcacttccaacaccaacatgtgcgccgtgattgacgggaacagcaccaccttcgagcaccagcagccgttacaagaccggatgttcaaatttgaactcacccgccgtctggagcatgactttggcaaggtgacaaagcaggaagtcaaagagttcttccgctgggcgcaggatcacgtgaccgaggtggcgcatgagttctacgtcagaaagggtggagccaacaagagacccgcccccgatgacgcggataaaagcgagcccaagcgggcctgcccctcagtcgcggatccatcgacgtcagacgcggaaggagctccggtggactttgccgacaggtaccaaaacaaatgttctcgtcacgcgggcatgcttcagatgctgcttccctgcaagacatgcgagagaatgaatcagaatttcagcatttgcttcacgcacgggaccagagactgttcagaatgtttccccggcgtgtcagaatctcaaccggtcgtcagaaagaggacgtatcggaaactctgtgccattcatcatctgctggggcgggctcccgagattgcttgctcggcctgcgatctggtcaacgtggacctggatgactgtgtttctgagcaataaatgacttaaaccaggtatggctgccgatggtcatcttccagattggctcgaggacaacctctctgagggcattcgcgagtggtgggacttgaaacctggagccccgaaacccaaagccaaccagcaaaagcaggacgacggccggggtctggtgcttcctggctacaagtacctcggacccttcaacggactcgacaagggggagcccgtcaacgcggcggacgcagcggccctcgagcacgacaaggcctacgaccagcagctcaaagcgggtgacaatccgtacctgcggtataaccacgccgacgccgagtttcaggagcgtcttcaagaagatacgtcttttgggggcaacctcgggcgagcagtcttccaggccaagaagcgggttctcgaacctctcggtctggttgaggaaggcgctaagacggctcctggaaagaagagacccatagaatcccccgactcctccacgggcatcggcaagaaaggccagcagcccgctaaaaagaagctcaactttgggcagactggcgactcagagtcagtgcccgaccctcaaccaatcggagaaccccccgcaggcccctctggtctgggatctggtacaatggctgcaggcggtggcgctccaatggcagacaataacgaaggcgccgacggagtgggtagttcctcaggaaattggcattgcgattccacatagctgggcgacagagtcatcaccaccagcacccgaacctgggccctccccacctacaacaaccacctctacaagcaaatctccaacgggacatcgggaggaagcaccaacgacaacacctacttcggctacagcaccccctgggggtattttgactttaacagattccactgccacttctcaccacgtgactggcagcgactcatcaacaacagctggggattccggcccaagagactcaacttcaagctcttcaacatccaggtcaaggaggtcacgcagaatgaaggcaccaagaccatcgccaataaccttaccagcacgattcaggtctttacggactcggaataccagctcccgtacgtcctcggctctgcgcaccagggctgcctgcctccgttcccggcggacgtcttcatgattcctcagtacgggtacctgactctgaacaacggcagtcaggccgtgggccgttcctccttctactgcctggagtactttccttctcaaatgctgagaacgggcaacaactttgagttcagctaccagtttgaggacgtgccttttcacagcagctacgcgcacagccaaagcctggaccggctgatgaaccccctcatcgaccagtacctgtactacctgtctcggactcagtccacgggaggtaccgcaggaactcagcagttgctattttctcaggccgggcctaataacatgtcggctcaggccaaaaactggctacccgggccctgctaccggcagcaacgcgtctccacgacactgtcgcaaaataacaacagcaactttgcttggaccggtgccaccaagtatcatctgaatggcagagactctctggtaaatcccggtgtcgctatggcaacgcacaaggacgacgaagagcgattttttccatccagcggagtcttgatgtttgggaaacagggagctggaaaagacaacgtggactatagcagcgttatgctaaccagtgaggaagaaatcaaaaccaccaacccagtggccacagaacagtacggcgtggtggccgataacctgcaacagcaaaacgccgctcctattgtaggggccgtcaacagtcaaggagccttacctggcatggtctggcagaaccgggacgtgtacctgcagggtcctatctgggccaagattcctcacacggacggcaactttcatccttcgccgctgatgggaggctttggactgaaacacccgcctcctcagatcctgattaagaatacacctgttcccgcggatcctccaactaccttcagtcaagccaagctggcgtcgttcatcacgcagtacagcaccggacaggtcagcgtggaaattgaatgggagctgcagaaagagaacagcaagcgctggaacccagagattcagtatacttccaactactacaaatctacaaatgtggactttgctgtcaatactgagggtacttattcagagcctcgccccattggcacccgttacctcacccgtaacctgtaattgcctgttaatcaataaaccggttaattcgtttcagttgaactttggtctctgcgaagggcgaattc

SEQ ID NO: 411 - protein, 731 aa, Artificial Sequence
  source: /note="Description of Artificial Sequence: Synthetic polypeptide"
MAADGYLPDWLEDNLSEGIREWWDLKPGAPKPKANQQKQDDGRGLVLPGYKYLGPFNGLDKGEPVNEADAAALEHDKAYDKQLEQGDNPYLKYNHADAEFQERLQEDTSFGGNLGRAVFRAKKRVLEPLGLVEEGAKTAPGKKRPIESPDSSTGIGKKGQQPAKKKLNFGQTGDSESVPDPQPLGEPPAAPSGLGSGTMAAGGGAPMADNNEGADGVGNASGNWHCDSTWLGDRVITTSTRTWALPTYNNHLYKQISSQSGATNDNHFFGYSTPWGYFDFNRFHCHFSPRDWQRLINNNRGFRPRKLRFKLFNIQVKEVTTNDGVTTIANNLTSTIQVFSDSEYQLPYVLGSAHQGCLPPFPADVFMIPQYGYLTLNNGSQSVGRSSFYCLEYFPSQMLRTGNNFEFSYQFEDVPFHSSYAHSQSLDRLMNPLIDQYLYYLSRTQSTGGTAGTQQLLFSQAGPNNMSAQAKNWLPGPCYRQQRVSTTLSQNNNSNFAWTGATKYHLNGRDSLVNPGVAMATHKDDEERFFPSSGVLMFGKQGAGKDNVDYSSVMLTSEEEIKTTNPVATEQYGVVADNLQQQNAAPIVGAVNSQGALPGMAWQNRDVYLQGPIWAKIPHTDGNFHPSPLMGGFGLKHPPPQILIKNTPVPADPPTTFSQAKLASFITQYSTGQVSVEIEWELQKENSKRWNPEIQYTSNYYKSTNVDFAVNTEGTYSEPRPIGTRYLTRNL

SEQ ID NO: 412 - DNA, 3106 bp, Artificial Sequence
  source: /note="Description of Artificial Sequence: Synthetic polynucleotide"
gaattcgcccttctacggctgcgtcaactggaccaatgagaactttcccttcaacgattgcgtcgacaagatggtgatctggtgggaggagggcaagatgacggccaaggtcgtggagtccgccaaggccattctcggcggcagcaaggtgcgcgtggaccaaaagtgcaagtcgtccgcccagatcgaccccacccccgtgatcgtcacctccaacaccaacatgtgcgccgtgattgacgggaacagcaccaccttcgagcaccagcagccgttgcaggaccggatgttcaaatttgaactcacccgccgtctggagcatgactttggcaaggcgacaaagcaggaagtcaaagagttcttccgctgggcgcaggatcacgtgaccgaggtggcgcatgagttctacgtcagaaagggtggagccaacaagagacccgcccccgatgacgcggataaaagcgagcccaagcgggcccgcccctcagtcgcggatccatcgacgtcagacgcggaaggagctccggtggactttgccgacaggtaccaaaacaaatgttctcgtcacgcgggcatgcttcagatgctgtttccctgcaaaacatgcgagagaatgaatcagaatttcaacatttgcttcacgcacgggaccagagactgttcagaatgtttccccggcgtgtcagaatctcaaccggtcgtcagaaagaggacgtatcggaaactctgtgccattcatcatctgctggggcgggctcccgagattgcttgctcggcctgcgatctggtcaacgtggacctggatgactgtgtttctgagcaataaatgacttaaaccaggtatggctgccgatggttatcttccagattggctcgaggacaacctctctgagggcattcgcgagtggtgggacttgaaacctggagccccgaaacccaaagccaaccagcaaaagcaggacgacggccggggtctggtgcttcctggctacaagtacctcggacccttcaacggactcgacaagggagagccggtcaacgaggcagacgccgcggccctcgagcacgacaaggcctacgacaagcagctcgagcagggggacaacccgtacctcaagtacaaccacgccgacgccgagtttcaggagcgtcttcaagaagatacgtcttttgggggcaacctcgggcgagcagtcttccgggccaagaagcgggttctcgaacctctcggtctggttgaggaaggcgctaagacggctcctggaaagaagagacccatagaatcccccgactcctccacgggcatcggcaagaaaggccagcagcccgctaaaaagaagctcaactttgggcagactggcgactcagagtcagtgcccgacccccaacctctcggagaacctcccgccgcgccctcaggtctgggatctggtacaatggctgcaggcggtggcgcaccaatggcagacaataacgaaggcgccgacggagtgggtaatgcctccggaaattggcattgcgattccacatggctgggcgacagagtcatcaccaccagcacccgcacctgggccctgcccacctacaacaaccacctctacaagcagatatcaagtcagagcggggctaccaacgacaaccacttcttcggctacagcaccccctggggctattttgacttcaacagattccactgccacttctcaccacgtgactggcagcgactcatcaacaacaaccggggattccggcccagaaagctgcggttcaagttgttcaacatccaggtcaaggaggtcacgacgaacgacggcgttacgaccatcgctaataaccttaccagcacgattcaggtcttctcggactcggagtaccaactgccgtacgtcctcggctctgcgcaccagggctgcctccctccgttccctgcggacgtgttcatgattcctcagtacggatatctgactctaaacaacggcagtcagtctgtgggacgttcctccttctactgcctggagtactttccttctcagatgctgagaacgggcaataactttgaattcagctaccagtttgaggacgtgccctttcacagcagctacgcgcacagccaaagcctggaccggctgatgaaccccctcatcgaccagtacctgtactacctgtctcggactcagtccacgggaggtaccgcaggaactcagcagttgctattttctcaggccgggcctaataacatgtcggctcaggccaaaaactggctacccgggccctgctaccggcagcaacgcgtctccacgacactgtcgcaaaataacaacagcaactttgcttggaccggtgccaccaagtatcatctgaatggcagagactctctggtaaatcccggtgtcgctatggcaacgcacaaggacgacgaagagcgattttttccatccagcggagtcttgatgtttgggaaacagggagctggaaaagacaacgtggactatagcagcgttatgctaaccagtgaggaagaaatcaaaaccaccaacccagtggccacagaacagtacggcgtggtggccgataacctgcaacagcaaaacgccgctcctattgtaggggccgtcaacagtcaaggagccttacctggcatggcctggcagaaccgggacgtgtacctgcagggtcctatctgggccaagattcctcacacggacggcaactttcatccttcgccgctgatgggaggctttggactgaaacacccgcctcctcagatcctgattaagaatacacctgttcccgcggatcctccaactaccttcagtcaagccaagctggcgtcgttcatcacgcagtacagcaccggacaggtcagcgtggaaattgaatgggagctgcagaaagagaacagcaagcgctggaacccagagattcagtatacttccaactactacaaatctacaaatgtggactttgctgtcaatactgagggtacttattcagagcctcgccccattggcacccgttacctcacccgtaacctgtaattgcctgttaatcaataaaccggttaattcgtttcagttgaactttggtctctgcgaagggcgaattc

SEQ ID NO: 413 - protein, 738 aa, Artificial Sequence
  source: /note="Description of Artificial Sequence: Synthetic polypeptide"
MAADGYLPDWLEDNLSEGIREWWDLKPGAPKPKANQQKQDDGRGLVLPGYKYLGPFNGLDKGEPVNEADAAALEHDKAYDKQLEQGDNPYLKYNHADAEFQERLQEDTSFGGNLGRAVFQAKKRVLEPLGLVEEGAKTAPGKKRPVEPSPQRSPDSSTGIGKTGQQPAKKRLNFGQTGDSESVPDPQPIGEPPAGPSGLGSGTMAAGGGAPMADNNEGADGVGSSSGNWHCDSTWLGDRVITTSTRTWALPTYNNHLYKQISNGTSGGSTNDNTYFGYSTPWGYFDFNRFHCHFSPRDWQRLINNNWGFRPKRLNFKLFNIQVKEVTQNEGTKTIANNLTSTIQVFTDSEYQLPYVLGSAHQGCLPPFPADVFMIPQYGYLTLNNGSQAVGRSSFYCLEYFPSQMLRTGNNFEFSYQFEDVPFHSSYAHSQSLDRLMNPLIDQYLYYLSRTQSTGGTAGTQQLLFSQAGPNNMSAQAKNWLPGPCYRQQRVSTTLSQNNNSNFAWTGATKYHLNGRDSLVNPGVAMATHKDDEERFFPSSGVLMFGKQGAGKDNVDYSSVMLTSEEEIKTTNPVATEQYGVVADNLQQQNAAPIVGAVNSQGALPGMVWQNRDVYLQGPIWAKIPHTDGNFHPSPLMGGFGLKHPPPQILIKNTPVPADPPTTFSQAKLASFITQYSTGQVSVEIEWELQKENSKRWNPEIQYTSNYYKSTNVDFAVNTEGTYSEPRPIGTRYLTRNL

SEQ ID NO: 414 - DNA, 3197 bp, Artificial Sequence
  source: /note="Description of Artificial Sequence: Synthetic polynucleotide"
gaattcgccctttctacggctgcgtcaactggaccaatgagaactttcccttcaacgattgcgtcgacaagatggtgatctggtgggaggagggcaagatgacggccaaggtcgtggagtccgccaaggccattctcggcggcagcaaggtgcgcgtggaccaaaagtgcaagtcgtccgcccagatcgaccccacccccgtgatcgtcacctccaacaccaacatgtgcgccgtgattgacgggaacagcaccaccttcgagcaccagcagccgttacaagaccggatgttcaaatttgaactcacccgccgtctggagcacgactttggcaaggtgacaaagcaggaagtcaaagagttcttccgctgggcgcaggatcacgtgaccgaggtggcgcatgagttctacgtcagaaagggtggagccaacaagagacccgcccccgatgacgcggataaaagcgagcccaagcgggcctgcccctcagtcgcggatccatcgacgtcagacgcggaaggagctccggtggactttgccgacaggtaccaaaacaaatgttctcgtcacgcgggcatgcttcagatgctgtttccctgcaagacatgcgagagaatgaatcagaatttcaacatttgcttcacgcacgggaccagagactgttcagaatgtttccccggcgtgtcagaatctcaaccggtcgtcagaaagaggacgtatcggaaactctgtgccattcatcatctgctggggcgggctcccgagattgcttgctcggcctgcgatctggtcaacgtggacctggatgactgtgtttctgagcaataaatgacttaaaccaggtatggctgccgatggttatcttccagattggctcgaggacaacctctctgagggcattcgcgagtggtgggacttgaaacctggagccccgaaacccaaagccaaccagcaaaagcaggacgacggccggggtctggtgcttcctggctacaagtacctcggacccttcaacggactcgacaagggagagccggtcaacgaggcagacgccgcggccctcgagcacgacaaggcctacgacaagcagctcgagcagggggacaacccgtacctcaagtacaaccacgccgacgccgagtttcaggagcgtcttcaagaagatacgtcttttgggggcaacctcgggcgagcagtcttccaggccaagaagcgggttctcgaacctctcggtctggttgaggaaggcgctaagacggctcctggaaagaagagaccggtagagccatcaccccagcgttctccagactcctctacgggcatcggcaagacaggccagcagcccgcgaaaaagagactcaactttgggcagactggcgactcagagtcagtgcccgaccctcaaccaatcggagaaccccccgcaggcccctctggtctgggatctggtacaatggctgcaggcggtggcgctccaatggcagacaataacgaaggcgccgacggagtgggtagttcctcaggaaattggcattgcgattccacatggctgggcgacagagtcatcaccaccagcacccgaacctgggccctccccacctacaacaaccacctctacaagcaaatctccaacgggacatcgggaggaagcaccaacgacaacacctacttcggctacagcaccccctgggggtattttgactttaacagattccactgccacttctcaccacgtgactggcagcgactcatcaacaacaactggggattccggcccaagagactcaacttcaagctcttcaacatccaggtcaaggaggtcacgcagaatgaaggcaccaagaccatcgccaataaccttaccagcacgattcaggtctttacggactcggaataccagctcccgtacgtcctcggctctgcgcaccagggctgcctgcctccgttcccggcggacgtcttcatgattcctcagtacgggtacctgactctgaacaacggcagtcaggccgtgggccgttcctccttctactgcctggagtactttccttctcaaatgctgagaacgggcaacaactttgagttcagctaccagtttgaggacgtgccttttcacagcagctacgcgcacagccaaagcctggaccggctgatgaaccccctcatcgaccagtacctgtactacctgtctcggactcagtccacgggaggtaccgcaggaactcagcagttgctattttctcaggccgggcctaataacatgtcggctcaggccaaaaactggctacccgggccctgctaccggcagcaacgcgtctccacgacactgtcgcaaaataacaacagcaactttgcttggaccggtgccaccaagtatcatctgaatggcagagactctctggtaaatcccggtgtcgctatggcaacgcacaaggacgacgaagagcgattttttccatccagcggagtcttgatgtttgggaaacagggagctggaaaagacaacgtggactatagcagcgttatgctaaccagtgaggaagaaatcaaaaccaccaacccagtggccacagaacagtacggcgtggtggccgataacctgcaacagcaaaacgccgctcctattgtaggggccgtcaacagtcaaggagccttacctggcatggtctggcagaaccgggacgtgtacctgcagggtcctatctgggccaagattcctcacacggacggcaactttcatccttcgccgctgatgggaggctttggactgaaacacccgcctcctcagatcctgattaagaatacacctgttcccgcggatcctccaactaccttcagtcaagccaagctggcgtcgttcatcacgcagtacagcaccggacaggtcagcgtggaaattgaatgggagctgcagaaagagaacagcaagcgctggaacccagagattcagtatacttccaactactacaaatctacaaatgtggactttgctgtcaatactgagggtacttattcagagcctcgccccattggcacccgttacctcacccgtaacctgtaattgcctgttaatcaataaaccggttaattcgtttcagttgaactttggtctctgcgaagggcgaattcgtttaaacctgcaggactagtccctttagtgagggttaattctgagcttggcgtaatcatgggtcatag

SEQ ID NO: 415 - protein, 735 aa, Artificial Sequence
  source: /note="Description of Artificial Sequence: Synthetic polypeptide"
MAADGYLPDWLEDNLSEGIREWWDLKPGAPKPKANQQKQDDGRGLVLPGYKYLGPFNGLDKGEPVNEADAAALEHDKAYDKQLEQGDNPYLKYNHADAEFQERLQEDTSFGGNLGRAVFQAKKRVLEPLGLVEEGAKTAPGKKRPVEPSPQRSPDSSTGIGKTGQQPAKKRLNFGQTGDSESVPDPQPIGEPPAGPSGLGSGTMAAGGGAPMADNNEGADGVGSSSGNWHCDSTWLGDRVITTSTRTWALPTYNNHLYKQISNGTSGGSTNDNTYFGYSTPWGYFDFNRFHCHFSPRDWQRLINNNWGFRPRKLRFKLFNIQVKEVTTDDGVTTIANNLTSTIQVFSDSEYQLPYVLGSAHQGCLPPFPADVFMIPQYGYLTLNNGSQSVGRSSFYCLEYFPSQMLRTGNNFEFSYTFEEVPFHSSYAHSQSLDRLMNPLIDQYLYYLARTQSTTGSTRELQFHQAGPNTMAEQSKNWLPGPCYRQQRLSKNIDSNNNSNFAWTGATKYHLNGRNSLTNPGVAMATNKDDEDQFFPINGVLVFGKTGAANKTTLENVLMTSEEEIKTTNPVATEEYGVVSSNLQSSTAGPQTQTVNSQGALPGMVWQNRDVYLQGPIWAKIPHTDGNFHPSPLMDGFGLKHPPPQILIKNTPVPANPPEVFTPAKFASFITQYSTGQVSVEIEWELQKENSKRWNPEIQYTSNYAKSNNVEFAVNNEGVYTEPRPIGTRYLTRNL

SEQ ID NO: 416 - DNA, 3276 bp, Artificial Sequence
  source: /note="Description of Artificial Sequence: Synthetic polynucleotide"
gaattcgcccttcgcagagaccaaagttcaactgaaacgaattaaccggtttattgattaacaggcaattacaggttacgggtgaggtaacgggtgccaatggggcgaggctcagtataaaccccttcgttgttgacagcaaattccacattattagacttggcataatttgaggtgtactgaatctctggattccagcgtttgctgttttctttctgcagttcccactcgatctccacgctgacctggccggtgctgtactgcgtgataaatgaggcaaacttggcaggagtaaacacctctggaggattagcaggtaccggggtgtttttgatgagaatttgaggaggcgggtgtttgagtccaaatccgtccatcaggggagacgggtgaaagttgccgtccgtgtgaggaattttggcccagatgggaccctgcaggtacacgtcccggttctgccagaccatgccgggcagagccccctggctgttgacagtctgtgtctggggtccggccgtagacgattgcaggttgctggagaccacaccgtattcttctgtagccacgggattggtggttttgatctcctcctcgctggtcattagcacgttttccagcgttgtcttgttggcagcccccgttttgccaaaaaccagcactccgttgatgggaaagaactggtcctcgtcgtccttgttggtggccatggctacgcccgggttggttaatgaatttctaccattcagatggtatttagtggccccggtccaggcaaagttactgttgttgttgctgtctatgttttttgacagtctctgctgccgataacagggtccgggcagccagttctttgattgctcggccatggtgttgggcccagcctgatggaactgcagctcccttgtggaccccgtagtgctctgggtccgggccaggtagtacaggtactggtcgatgaggggattcatcagccggtccaggctctggctatgcgcatagctgctgtggaaaggcacttcctcaaaggtgtagctgaattcaaagttattgcccgttctcagcatctgagaaggaaagtactccaggcagtagaaggaggaacgtcccacagactgactgccgttgtttagagtcagatatccgtactgaggaatcatgaacacgtccgcagggaacggagggaggcagccctggtgcgcagagccgaggacgtacggcagttggtactccgagtccgagaagacctgaatcgtgctggtaaggttattagcgatggtcgtaacgccgtcgtccgtcgtgacctccttgacctggatgttgaacaacttgaaccgcagctttctgggccggaatccccagttgttgttgatgagtcgctgccagtcacgtggtgagaagtggcagtggaatctgttaaagtcaaaatacccccagggggtgctgtagccgaagtaggtgttgtcgttggtgcttcctcccgatgtcccgttggagatttgcttgtagaggtggttgttgtaggtggggagggcccaggttcgggtgctggtggtgatgactctgtcgcccagccatgtggaatcgcaatgccaatttcctgaggaactacccactccgtcggcgccttcgttattgtctgccattggagcgccaccgcctgcagccattgtaccagatcccagaccagaggggcctgcggggggttctccgattggttgagggtcgggcactgactctgagtcgccagtctgcccaaagttgagtctctttttcgcgggctgctggcctgtcttgccgatgcccgtagaggagtctggagaacgctggggtgatggctctaccggtctcttctttccaggagccgtcttagcgccttcctcaaccagaccgagaggttcgagaacccgcttcttggcctggaagactgctcgcccgaggttgcccccaaaagacgtatcttcttgaagacgctcctgaaactcggcgtcggcgtggttgtacttgaggtacgggttgtccccctgctcgagctgcttgtcgtaggccttgtcgtgctcgagggccgcggcgtctgcctcgttgaccggctctcccttgtcgagtccgttgaagggtccgaggtacttgtagccaggaagcaccagaccccggccgtcgtcctgcttttgctggttggctttgggtttcggggctccaggtttcaagtcccaccactcgcgaatgccctcagagaggttgtcctcgagccaatctggaagataaccatcggcagccatacctggtttaagtcatttattgctcagaaacacagtcatccaggtccacgttgaccagatcgcaggccgagcaagcaatctcgggagcccgccccagcagatgatgaatggcacagagtttccgatacgtcctctttctgacgaccggttgagattctgacacgccggggaaacattctgaacagtctctggtcccgtgcgtgaagcaaatgttgaaattctgattcattctctcgcatgtcttgcagggaaacagcatctgaagcatgcccgcgtgacgagaacacttgttttggtacctgtcggcaaagtccaccggagctccttccgcgtctgacgtcgatggatgcaaaatgtcgcaaaagcactcacgtgacagctaatacaggaccactcccctatgacgtgatttacgtcagcgctatgcccgcgtgacgagaacatttgttttggtacctgtcggcaaagtccaccggagctccttccgcgtctgacgtcgatggatccgcgactgaggggcaggcccgcttgggctcgcttttatccgcgtcatcgggggcgggtctcttgttggctccaccctttctgacgtagaactcatgcgccacctcggtcacgtgatcctgcgcccagcggaagaactctttgacttcctgctttgtcaccttgccaaagtcatgctccagacggcgggtgagttcaaatttgaacatccggtcctgcaacggctgctggtgctcgaaggtggtgctgttcccgtcaatcacggcgcacatgttggtgttggaagtgacgatcacgggggtgggatcgatctgggcggaagacttgcacttttggtccacgcgcaccttgctgccgccgagaatggccttggcggactccacgaccttggccgtcatcttgccctcctcccaccagatcaccatcttgtcgacgcaatcgttgaagggaaagttctcattggtccagttgacgcagccgtagaaagggcgaattc

SEQ ID NO: 417 - protein, 738 aa, Artificial Sequence; identical to SEQ ID NO: 82
  source: /note="Description of Artificial Sequence: Synthetic polypeptide"

SEQ ID NO: 418 - protein, 738 aa, Artificial Sequence
  source: /note="Description of Artificial Sequence: Synthetic polypeptide"
MAADGYLPDWLEDNLSEGIREWWDLKPGAPKPKANQQKQDDGRGLVLPGYKYLGPFNGLDKGEPVNAADAAALEHDKAYDQQLKAGDNPYLRYNHADAEFQERLQEDTSFGGNLGRAVFQAKKRVLEPLGLVEEGAKTAPGKKRPVEPSPQRSPDSSTGIGKKGHQPARKRLNFGQTGDSESVPDPQPIGEPPAGPSGLGSGTMAAGGGAPMADNNEGADGVGSSSGNWHCDSTWLGDRVITTSTRTWALPTYNNHLYKQISNGTSGGSTNDNTYFGYSTPWGYFDFNRFHCHFSPRDWQRLINNNWGFRPKRLNFKLFNIQVKEVTQNEGTKTIANNLTSTIQVFTDSEYQLPYVPGSAHQGCLPPFPADVFMIPQYGYLTLNNGSQAVGRSSFYCLEYFPSQMLRTGNNFEFSYTFEDVPFHSSYAHSQSLDRLMNPLIDQYLYYLSRTQSTGGTQGTQQLLFSQAGPANMSAQAKNWLPGPCYRQQRVSTTLSQNNNSNFAWTGATKYHLNGRDSLVNPGVAMATHKDDEERFFPSSGVLMFGKQGAGKDNVDYSSVMLTSEEEIKTTNPVATEQYGVVADNLQQTNGAPIVGTVNSQGALPGMVWQNRDVYLQGPIWAKIPHTDGNFHPSPLMGGFGLKHPPPQILIKNTPVPADPPTTFSQAKLASFITQYSTGQVSVEIEWELQKENSKRWNPEIQYTSNYYKSTNVDFAVNTEGTYSEPRPIGTRYLTRNL

SEQ ID NO: 419 - protein, 738 aa, Artificial Sequence; identical to SEQ ID NO: 80
  source: /note="Description of Artificial Sequence: Synthetic polypeptide"

SEQ ID NO: 420 - protein, 728 aa, Artificial Sequence
  source: /note="Description of Artificial Sequence: Synthetic polypeptide"
MAADGYLPDWLEDNLSEGIREWWDLKPGAPKPKANQQKQDDGRGLVLPGYKYLGPFNGLDKGEPVNEADAAALEHDKAYDKQLEQGDNPYLKYNHADAEFQERLQEDTSFGGNLGRAVFQAKKRVLEPLGLVEEGAKTAPGKKRPIESPDSSTGIGRKGQQPAKKKLNFGQTGDSESVPDPQPIGEPPAGPSGLGSGTMAAGGGAPMADNNEGADGVGNASGNWHCDSTWLGDRVITTSTRTWALPTYNNHLYKQISSQSGATNDNHFFGYSTPWGYFDFNRFHCHFSPRDWQRLINNNWGFRPRKLRFKLFNIQVKEVTTNDGVTTIANNLTSTIQVFSDSEYQLPYVLGSAHQGCLPPFPADVFMIPQYGYLTLNNGSQSVGRSSFYCLEYFPSQMLRTGNNFEFSYTFEEVPFHSSYAHSQSLDRLMNPLIDQYLYYLARTQSTTGSTRELQFHQAGPNTMAEQSKNWLPGPCYRQQRLSKNIDSNNNSNFAWTGATKYHLNGRNSLTNPGVAMATNKDDEDQFFPINGVLVFGKTGAANKTTLENVLMTSEEEIKTTNPVATEEYGVVSSNLQSSTAGPQTQTVNSQGALPGMVWQNRDVYLQGPIWAKIPHTDGNFHPSPLMGGFGLKHPPPQILIKNTPVPANPPEVFTPAKFASFITQYSTGQVSVEIEWELQKENSKRWNPEIQYTSNYAKSNNVEFAVNNEGVYTEPRPIGTRYLTRNL

SEQ ID NO: 421 - DNA, 2489 bp, Artificial Sequence
  source: /note="Description of Artificial Sequence: Synthetic polynucleotide"
gaattcgccctttctacggctgcgtcaactggaccaatgagaactttcccttcaacgattgcgtcgacaagatggtgatctggtgggaggagggcaagatgacggccaaggtcgtgaagtccgccaaggccattcatcatctgctggggcgggctcccgagattgcttgctcggcctgcgatctggtcaacgtggacctggatgactgtgtttctgagcaataaatgacttaaaccaggtatggctgccgatggttatcttccagattggctcgaggacaacctctctgagggcattcgcgagtggtgggacttgaaacctggagccccgaaacccaaagccaaccagcaaaagcaggacgacggccggggtctggtgcttcctggctacaagtacctcggacccttcaacggactcgacaagggagagccggtcaacgaggcagacgccgcggccctcgagcacgacaaggcctacgacaagcagctcgagcagggggacaacccgtacctcaagtacaaccacgccgacgccgagtttcaggagcgtcttcaagaagatacgtcttttgggggcaacctcgggcgagcagtcttccaggccaagaagcgggttctcgaacctctcggtctggttgaggaaggcgctaagacggctcctggaaagaagagacccatagaatcccccgactcctccacgggcatcggcaggaaaggccagcagcccgctaaaaagaagctcaactttgggcagactggcgactcagagtcagtgcccgaccctcaaccaatcggagaaccccccgcaggcccctctggtctgggatctggtacaatggctgcaggcggtggcgctccaatggcagacaataacgaaggcgccgacggagtgggtaatgcctccggaaattggcattgcgattccacatggctgggcgacagagtcatcaccaccagcacccgcacctgggccctgcccacctacaacaaccacctctacaagcagatatcaagtcagagcggggctaccaacgacaaccacttcttcggctacagcaccccctggggctattttgacttcaacagattccactgccacttctcaccacgtgactggcagcgactcatcaacaacaactggggattccggcccagaaagctgcggttcaagttgttcaacatccaggtcaaggaggtcacgacgaacgacggcgttacgaccatcgccaataaccttaccagcacgattcaggtcttctcggactcggagtaccaactgccgtacgtcctcggctctgcgcaccagggctgcctccctccgttccctgcggacgtgttcatgattcctcagtacggatatctgactctaaacaacggcagtcagtctgtgggacgttcctccttctactgcctggagtactttccttctcagatgctgagaacgggcaataactttgaattcagctacacctttgaggaagtgcctttccacagcagctatgcgcacagccagagcctggaccggctgatgaatcccctcatcgaccagtacctgtactacctggcccggacccagagcactacggggtccacaagggagctgcagttccatcaggctgggcccaacaccatggccgagcaatcaaagaactggctgcccggaccctgttatcggcagcagagactgtcaaaaaacatagacagcaacaacaacagtaactttgcctggaccggggccactaaataccatctgaatggtagaaattcattaaccaacccgggcgtagccatggccaccaacaaggacgacgaggaccagttctttcccatcaacggagtgctggtttttggcaaaacgggggctgccaacaagacaacgctggaaaacgtgctaatgaccagcgaggaggagatcaaaaccaccaatcccgtggctacagaagaatacggtgtggtctccagcaacctgcaatcgtctacggccggaccccagacacagactgtcaacagccagggggctctgcccggcatggtctggcagaaccgggacgtgtacctgcagggtcccatctgggccaaaattcctcacacggacggcaactttcacccgtctcccctgatgggcggatttggactcaaacacccgcctcctcaaattctcatcaaaaacaccccggtacctgctaatcctccagaggtgtttactcctgccaagtttgcctcatttatcacgcagtacagcaccggccaggtcagcgtggagatcgagtgggaactgcagaaagaaaacagcaaacgctggaatccagagattcagtacacctcaaattatgccaagtctaataatgtggaatttgctgtcaacaacgaaggggtttatactgagcctcgccccattggcacccgttacctcacccgtaacctgtaattgcctgttaatcaataaaccggttaattcgtttcagttgaactttggtcaagggcgaattc

SEQ ID NO: 422 - protein, 728 aa, Artificial Sequence
  source: /note="Description of Artificial Sequence: Synthetic polypeptide"
MAADGYLPDWLEDNLSEGIREWWDLKPGAPKPKANQQKQDDGRGLVLPGYKYLGPFNGLDKGEPVNAADAAALEHDKAYDQQLKAGDNPYLRYNHADAEFQERLQEDTSFGGNLGRAVFQAKKRVLEPLGLVEEGAKTAPGKKRPIESPDSSTGIGKKGQQPAKKKLNFGQTGDSESVPDPQPIGEPPAGPSGLGSGTMAAGGGAPMADNNEGADGVGNASGNWHCDSTWLGDRVITTSTRTWALPTYNNHLYKQISSQSGATNDNHFFGYSTPWGYFDFNRFHCHFSPRDWQRLINNNWGFRPRKLRFKLFNIQVKEVTTNDGVTTIANNLTSTIQVFSDSEYQLPYVLGSAHQGCLPPFPADVFMIPQYGYLTLNNGSQSVGRSSFYCLEYFPSQMLRTGNNFEFSYTFEEVPFHSSYAHSQSLDRLMNPLIDQYLYYLARTQSTTGSTRELQFHQAGPNTMAEQSKNWLPGPCYRRQRLSKDIDSNNNSNFAWTGATKYHLNGRNSLTNPGVAMATNKDDEDQFFPINGVLVFGKTGAANKTTLENVLMTSEEEIKTTNPVATEEYGVVSSNLQSSTAGPQTQTVNSQGALPGMVWQNRDVYLQGPIWAKIPHTDGNFHPSPLMGGFGLKHPPPQILIKNTPVPANPPEVFTPAKFASFITQYSTGQVSVEIEWELQKENSKRWNPEIQYTSNYAKSNNVEFAVNNEGVYTEPRPIGTRYLTRNL

SEQ ID NO: 423 - DNA, 3098 bp, Artificial Sequence
  source: /note="Description of Artificial Sequence: Synthetic polynucleotide"
gaattcgccctttctacggctgcgtcaactggaccaatgagaactttcccttcaacgattgcgtcgacaagatggtgatctggtgggaggagggcaagatgacggccaaggtcgtggagtccgccaaggccattctcggcggcagcaaggtgcgcgtggaccaaaagtgcaagtcttccgcccagatcgatcccacccccgtgatcgtcacttccaacaccaacatgtgcgccgtgattgacgggaacagcaccaccttcgagcaccagcagccgttacaagaccggatgttcaaatttgaactcacccgccgtctggagcacgactttggcaaggtgacaaagcaggaagtcaaagagttcttccgctgggcgcaggatcacgtgaccgaggtggcgcatgagttctacgtcagaaagggtggagccaacaagagacccgcccccgatgacgcggataaaagcgagcccaagcgggcctgcccctcagtcgcggatccatcgacgtcagacgcggaaggagctccggtggactttgccgacaggtaccaaaacaaatgttctcgtcacgcgggcatgcttcagatgctgtttccctgcaagacatgcgagagaatgaatcagaatttcaacatttgcttcacgcacgggaccggagactgttcagaatgtttccccggcgtgtcagaatctcaaccggtcgtcagaaagaggacgtatcggaaactctgtgccattcatcatctgctggggcgggctcccgagattgcttgctcggcctgcgatctggtcaacgtggacctggatgactgtgtttctgagcaataaatgacttaaaccaggtatggctgccgatggttatcttccagattggctcgaggacaacctctctgagggcattcgcgagtggtgggacttgaaacctggagccccgaaacccaaagccaaccagcaaaagcaggacgacggccggggtctggtgcttcctggctacaagtacctcggacccttcaacggactcgacaagggagagccggtcaacgcggcggacgcagcggccctcgagcacgacaaggcctacgaccagcagctcaaagcgggtgacaatccgtacctgcggtataaccacgccgacgccgagtttcaggagcgtcttcaagaagatacgtcttttgggggcaacctcgggcgagcagtcttccaggccaagaagcgggttctcgaacctctcggtctggttgaggaaggcgctaagacggctcctggaaagaagagacccatagaatcccccgactcctccacgggcatcggcaagaaaggccagcagcccgctaaaaagaagctcaactttgggcagactggcgactcagagtcagtgcccgaccctcaaccaatcggagaaccccccgcaggcccctctggtctgggatctggtacaatggctgcaggcggtggcgctccaatggcagacaataacgaaggcgccgacggagtgggtaatgcctccggaaattggcattgcgattccacatggctgggcgacagagtcatcaccaccagcacccgcacctgggccctgcccacctacaacaaccacctctacaagcagatatcaagtcagagcggggctaccaacgacaaccacttcttcggctacagcaccccctggggctattttgacttcaacagattccactgccacttctcaccacgtgactggcagcgactcatcaacaacaactggggattccggcccagaaagctgcggttcaagttgttcaacatccaggtcaaggaggtcacgacgaacgacggcgttacgaccatcgctaataaccttaccagcacgattcaggtcttctcggactcggagtaccaactgccgtacgtcctcggctctgcgcaccagggctgcctccctccgttccctgcggacgtgttcatgattcctcagtacggatatctgactctaaacaacggcagtcagtctgtgggacgttcctccttctactgcctggagtactttccttctcagatgctgagaacgggcaataactttgaattcagctacacctttgaggaagtgcctttccacagcagctatgcgcacagccagagcctggaccggctgatgaatcccctcatcgaccagtacctgtactacctggcccggacccagagcactacggggtccacaagggagctgcagttccatcaggctgggcccaacaccatggccgagcaatcaaagaactggctgcccggaccctgttatcggcggcagagactgtcaaaagacatagacagcaacaacaacagtaactttgcctggaccggggccactaaataccatctgaatggtagaaattcattaaccaacccgggcgtagccatggccaccaacaaggacgacgaggaccagttctttcccatcaacggagtgctggtttttggcaaaacgggggctgccaacaagacaacgctggaaaacgtgctaatgaccagcgaggaggagatcaaaaccaccaatcccgtggctacagaagaatacggtgtggtctccagcaacctgcaatcgtctacggccggaccccagacacagactgtcaacagccagggggctctgcccggcatggtctggcagaaccgggacgtgtacctgcagggtcccatctgggccaaaattcctcacacggacggcaactttcacccgtctcccctgatgggcggatttggactcaaacacccgcctcctcaaattctcatcaaaaacaccccggtacctgctaatcctccagaggtgtttactcctgccaagtttgcctcatttatcacgcagtacagcaccggccaggtcagcgtggagatcgagtgggaactgcagaaagagaacagcaaacgctggaatccagagattcagtacacctcaaattatgccaagtctaataatgtggaatttgctgtcaacaacgaaggggtttatactgagcctcgccccattggcacccgttacctcacccgtaacctgtaattacttgttaatcaataaaccggttgattcgtttcagttgaactttggtctctgcgaagggcgaattc

SEQ ID NO: 424 - protein, 685 aa, Artificial Sequence
  source: /note="Description of Artificial Sequence: Synthetic polypeptide"
MAADGYLPDWLEDNLSEGIREWWDLKPGAPKPKANQQKQDDGRGLVLPGYKYLGPFNGLDKGEPVNEADAAALEHDKAYDKQLEQGDNPYLKYNHADAEFQERLQEDTSFGGNLGRAVFQAKKRVLEPLGLVEEGAKTAPGKKRPVEPSPQRSPDSSTGIGKTGQQPAKKRLNFGQTGDSESVPDPQPIGEPPAGPSGLGSGTMAAGGGAPMADNNEGADGVGSSSGNWHCDSTWLGDRVITTSTRTWALPTYNNHLYKQISNGTSGGSTNDNTYFGYSTPWGYFDFNRFHCHFSPRDWQRLINNNWGFRPKRLNFKLFNIQVKEVTQNEGTKTIANNLTSTIQVFTDSEYQLPYVLGSAHQGCLPPFPADVFMIPQYGYLTLNNGSQAVGRSSFYCLEYFPSQMLRTGNNFEFSYQFEDVPFHSSYAHSQSLDRLTNPLIDQYLYYLARTQSTTGSTRGLQFHQAGPNTMAEQSKNWLPGPCYRQQRLSKNIDSNNNSNFAWTGATKYHLNGRNSLTNPGVAMATNKDDEDQFFPINGVLVFGKTGAANKTTLENVLMTSEEEIKTTNPVATEEYGVVSSNLQSSTAGPQTQTVNSQGALPGMVWQNRDVYLQGPIWAKIPHTDGNFHPSPLMGGFGLKHPPPQILIKYTSNYYKSTNVDFAVNTEGTYSEPRPIGTRYLTRNL

SEQ ID NO: 425 - DNA, 2969 bp, Artificial Sequence
  source: /note="Description of Artificial Sequence: Synthetic polynucleotide"
gaattcgccctttctacggctgcgtcaactggaccaatgagaactttcccttcaacgattgcgtcgacaagatggtgatctggtgggaggagggcaagatgacggccaaggtcgtggagtccgccaaggccattctcggcggcagcaaggtgcgcgtggaccaaaagtgcaagtcgtccgcccagatcgaccccacccccgtgatcgtcacctccaacaccaacatgtgcgccgtgattgacgggaacagcaccaccttcgagcaccagcagccgttacaagaccggatgttcaaatttgaactcacccgccgtctggagcacgactttggcaaggtgacaaagcaggaagtcaaagagttcttccgctgggcgcaggatcacgtgaccgaggtggcgcatgagttctacgtcagaaagggtggagccaacaagagacccgcccccgatgacgcggataaaagcgagcccaagcgggcctgcccctcagtcgcggatccatcgacgtcagacgcggaaggagctccggtggactttgccgacaggtaccaaaacaaatgttctcgtcacgcgggcatgcttcagatgctgtttccctgcaagacatgcgagagaatgaatcagaatttcaacatttgcttcacgcacgggaccagagactgttcagaatgtttccccggcgtgtcagaatctcaaccggtcgtcagaaagaggacgtatcggaaactctgtgccattcatcatctgctggggcgggctcccgagattgcttgctcggcctgcgatctggtcaacgtggacctggatgactgtgtttctgagcaataaatgacttaaaccaggtatggctgccgatggttatcttccagattggctcgaggacaacctctctgagggcatccgcgagtggtgggacttgaaacctggagccccgaaacccaaagccaaccagcaaaagcaggacgacggccggggtctggtgcttcctggctacaagtacctcggacccttcaacggactcgacaagggagagccggtcaacgaggcagacgccgcggccctcgagcacgacaaggcctacgacaagcagctcgagcagggggacaacccgtacctcaagtacaaccacgccgacgccgagtttcaggagcgtcttcaagaagatacgtcttttgggggcaacctcgggcgagcagtcttccaggccaagaagcgggttctcgaacctctcggtctggttgaggaaggcgctaagacggctcctggaaagaagagaccggtagagccatcaccccagcgttctccagactcctctacgggcatcggcaagacaggccagcagcccgcgaaaaagagactcaactttgggcagactggcgactcagagtcagtgcccgaccctcaaccaatcggagaaccccccgcaggcccctctggtctgggatctggtacaatggctgcaggcggtggcgctccaatggcagacaataacgaaggcgccgacggagtgggtagttcctcaggaaattggcattgcgattccacatggctgggcgacagagtcatcaccaccagcacccgaacctgggccctccccacctacaacaaccacctctacaagcaaatctccaacgggacatcgggaggaagcaccaacgacaacacctacttcggctacagcaccccctgggggtattttgactttaacagattccactgccacttctcaccacgtgactggcagcgactcatcaacaacaactggggattccggcccaagagactcaacttcaagctcttcaacatccaggtcaaggaggtcacgcagaatgaaggcaccaagaccatcgccaataaccttaccagcacgattcaggtctttacggactcggaataccagctcccgtacgtcctcggctctgcgcaccagggctgcctgcctccgttcccggcggacgtcttcatgattcctcagtacgggtacctgactctgaacaacggcagtcaggccgtgggccgttcctccttctactgcctggagtactttccttctcaaatgctgagaacgggcaacaactttgagttcagctaccagtttgaggacgtgccttttcacagcagctacgcgcacagccaaagcctggaccggctgacgaaccccctcatcgaccagtacctgtactacctggcccggacccagagcactacggggtccacaagggggctgcagttccatcaggctgggcccaacaccatggccgagcaatcaaagaactggctgcccggaccctgttatcggcagcagagactgtcaaaaaacatagacagcaacaacaacagtaactttgcctggaccggggccactaaataccatctgaatggtagaaattcattaaccaacccgggcgtagccatggccaccaacaaggacgacgaggaccagttctttcccatcaacggagtgctggtttttggcaaaacgggggctgccaacaagacaacgctggaaaacgtgctaatgaccagcgaggaggagatcaaaaccaccaatcccgtggctacagaagaatacggtgtggtctccagcaacctgcaatcgtctacggccggaccccagacacagactgtcaacagccagggggctctgcccggcatggtctggcagaaccgggacgtgtacctgcagggtcccatctgggccaaaattcctcacacggacggcaactttcacccgtctcccctgatgggcggatttggactcaaacacccgcctcctcaaattctcatcaagtatacttccaactactacaaatctacaaatgtggactttgctgtcaatactgagggtacttattcagagcctcgccccattggcacccgttacctcacccgtaacctgtaattgcctgttaatcaataaaccggttaattcgtttcagttgaactttggtctctgcgaagggcgaattc

SEQ ID NO: 426 - protein, 733 aa, Artificial Sequence
  source: /note="Description of Artificial Sequence: Synthetic polypeptide"
MAADGYLPDWLEDNLSEGIREWWDLKPGAPKPKANQQKQDDGRGLVLPGYKYLGPFNGLDKGEPVNAADAAALEHDKAYDQQLKAGDNPYLRYNHADAEFQERLQEDTSFGGNLGRAVFQAKKRVLEPLGLVEEGAKTAPGKKRPIESPDSSTGIGKKGQQPAKKKLNFGQTGDSESVPDPQPIGEPPAGPSGLGSGTMAAGGGAPMADNNEGADGVGSSSGNWHCDSTWLGDRVITTSTRTWALPTYNNHLYKQISNGTSGGSTNDNTYFGYSTPWGYFDFNRFHCHFSPRDWQRLINNNWGFRPKRLNFKLFNIQVKEVTQNEGTKTIANNLTSTIQVFTDSEYQLPYVLGSAHQGCLPPFPADVFMIPQYGYLTLNNGSQAVGRSSFYCLEYFPSQMLRTGNNFEFSYQFEDVPFHSSYAHSQSLDRLMNPLIDQYLYYLSRTQSTGGTAGTQQLLFSQAGPNNMSAQAKNWLPGPCYRQQRVSTTVSQNNNSNFAWTGATKYHLNGRDSLVNPGVAMATHKGDEERFFPSSGVLMFGKQGAGKDNVDYSSVMLTSEEEIKTTNPVATEQYGVVADNLQQQNAAPIVGAVNSQGALPGMVWQNRDVYLQGPIWAKIPHTDGNFHPSPLMGGFGLKHPPPQILIKNTPVPADPPTTFSQAKLASFITQYSTGQVSVEIEWELQKENSKRWNPEIQYTSNYYKSTNVDFAVNTEGTYSEPRPIGTRYLTRSL

SEQ ID NO: 427 - DNA, 3113 bp, Artificial Sequence
  source: /note="Description of Artificial Sequence: Synthetic polynucleotide"
gaattcgccctttctacggctgcgtcaactggaccaatgagaactttcccttcaacgattgcgtcgacaagatggtgatctggtgggaggagggcaagatgacggccaaggtcgtggagtccgccaaggccattctcggcggcagcaaggtgcgcgtggaccaaaagtgcaagtcgtccgcccagatcgatcccacccccgtgatcgtcacttccaacaccaacatgtgcgccgtgattgacgggaacagcaccaccttcgagcaccagcagccgttacaagaccggatgttcaaatttgaactcacccgccgtctggagcatgactttggcaaggtgacaaagcaggaagtcaaagagttcttccgctgggcgcaggatcacgtgaccgaggtggcgcatgagttctacgtcagaaagggtggagccaacaagagacccgcccccgatgacgcggataaaagcgagcccaagcgggcctgcccctcagtcgcggatccatcgacgtcagacgcggaaggagctccggtggactttgccgacaggtaccaaaacaaatgttctcgtcacgcgggcatgcttcagatgctgtttccctgcaagacatgcgagagaatgaatcagaatttcaacatttgcttcacgcacgggaccagagactgttcagaatgtttccccggcgtgtcagaatctcaaccggtcgtcagaaagaggacgtatcggaaactctgtgccattcatcatctgctggggcgggctcccgagattgcttgctcggcctgcgatctggtcaacgtggacctggatgactgtgtttctgagcaataaatgacttaaaccaggtatggctgccgatggttatcttccagattggctcgaggacaacctctctgagggcattcgcgagtggtgggacttgaaacctggagccccgaaacccaaagccaaccagcaaaagcaggacgacggccggggtctggtgcttcctggctacaagtacctcggacccttcaacggactcgacaagggggagcccgtcaacgcggcggacgcagcggccctcgagcacgacaaggcctacgaccagcagctcaaagcgggtgacaatccgtacctgcggtataaccacgccgacgccgagtttcaggagcgtcttcaagaagatacgtcttttgggggcaacctcgggcgagcagtcttccaggccaagaagcgggttctcgaacctctcggtctggttgaggaaggcgctaagacggctcctggaaagaagagacccatagaatcccccgactcctccacgggcatcggcaagaaaggccagcagcccgctaaaaagaagctcaactttgggcagactggcgactcagagtcagtgcccgaccctcaaccaatcggagaaccccccgcaggcccctctggtctgggatctggtacaatggctgcaggcggtggcgctccaatggcagacaataacgaaggcgccgacggagtgggtagttcctcaggaaattggcattgcgattccacatggctgggcgacagagtcatcaccaccagcacccgaacctgggccctccccacctacaacaaccacctctacaagcaaatctccaacgggacatcgggaggaagcaccaacgacaacacctacttcggctacagcaccccctgggggtattttgactttaacagattccactgccacttctcaccacgtgactggcagcgactcatcaacaacaactggggattccggcccaagagactcaacttcaagctcttcaacatccaggtcaaggaggtcacgcagaatgaaggcaccaagaccatcgccaataaccttaccagcacgattcaggtctttacggactcggaataccagctcccgtacgtcctcggctctgcgcaccagggctgcctgcctccgttcccggcggacgtcttcatgattcctcagtacgggtacctgactctgaacaacggcagtcaggccgtgggccgttcctccttctactgcctggagtactttccttctcaaatgctgagaacgggcaacaactttgagttcagctaccagtttgaggacgtgccttttcacagcagctatgcgcacagccaaagcctggaccggctgatgaaccccctcatcgaccagtacctgtactacctgtctcggactcagtccacgggaggtaccgcaggaactcagcagttgctattttctcaggccgggcctaataacatgtcggctcaggccaaaaactggctacccgggccctgctaccggcagcaacgcgtctccacgacagtgtcgcaaaataacaacagcaactttgcttggaccggtgccaccaagtatcatctgaatggcagagactctctggtaaatcccggtgtcgctatggcaacgcacaagggcgacgaagagcgattttttccatccagcggagtcttgatgtttgggaaacagggagctggaaaagacaacgtggactatagcagcgttatgctaaccagtgaggaagaaatcaaaaccaccaacccagtggccacagaacagtacggcgtggtggccgataacctgcaacagcaaaacgccgctcctattgtaggggccgtcaacagtcaaggagccttacctggcatggtctggcagaaccgggacgtgtacctgcagggtcctatctgggccaagattcctcacacggacggcaactttcatccttcgccgctgatgggaggctttggactgaaacacccgcctcctcagatcctgattaagaatacacctgttcccgcggatcctccaactaccttcagtcaagccaagctggcgtcgttcatcacgcagtacagcaccggacaggtcagcgtggaaattgaatgggagctgcagaaagagaacagcaagcgctggaacccagagattcagtatacttccaactactacaaatctacaaatgtggactttgctgtcaatactgagggtacttattcagagcctcgccccattggcacccgttacctcacccgtagcctgtaattgcctgttaatcaataaaccggttgattcgtttcagttgaactttggtctctgcgaagggcgaattc

SEQ ID NO: 428 - protein, 738 aa, Artificial Sequence
  source: /note="Description of Artificial Sequence: Synthetic polypeptide"
MAADGYLPDWLEDNLSEGIREWWDLKPGAPKPKANQQKQDDGRGLVLPGYKYLGPFNGLDKGEPVNAADAAALEHDKAYDQQLKAGDNPYLRYNHADAEFQERLQEDTSFGGNLGRAVFQAKKRVLEPLGLVEEGAKTAPGKKRPVEPSPQRSPDSSTGIGKTGQQPAKKRLNFGQTGDSESVPDPQPIGEPPAGPSGLGSGTMAAGGGAPMADNNEGADGVGSSSGNWHCDSTWLGDRVITTSTRTWALPTYNNHLYKQISNGTSGGSTNDNTYFGYSTPWGYFDFNRFHCHFSPRDWQRLINNNWGFRPKRLNFKLFNIQVKEVTQNEGTKTIANNLTSTIQVFTDSEYQLPYVLGSAHQGCPPPFPADVFMIPQYGYLTLNNGSQAVGRSSFYCLEYFPSQMRRTGNNFEFSYQFEDVPFHSSYAHSQSLDRLMNPLIDQYLYYLSRTQSTGGTAGTQQLLFSQAGPNNMSAQAKNWLPGPCYRQQRVSTTLSQNNNSNFAWTGATKYHLNGRDSLVNPGVAMATHKDDEERFFPSSGVLMFGKQGAGKDNVDYSSVMLTSEEEIKTTNPVATEQYGVVADNLQQQNAAPIVGAVNSQGALPGMVWQNRDVYLQGPIWAKIPHTDGNFHPSPLMGGFGLKHPPPQILIKNTPVPADPPTTFSQAKLASFITQYSTGQVSVEIEWELQKENSKRWNPEIQYTSNYYKSTNVDFAVNTEGTYSEPRPIGTRYLTRNL

SEQ ID NO: 429 - DNA, 3128 bp, Artificial Sequence
  source: /note="Description of Artificial Sequence: Synthetic polynucleotide"
gaattcgccctttctacggctgcgtcaactggaccaatgagaactttcccttcaacgattgcgtcgacaagatggtgatctggtgggaggagggcaagatgacggccaaggtcgtggagtccgccaaggccattctcggcggcagcaaggtgcgcgtggaccaaaagtgcaagtcgtccgcccagatcgaccccacccccgtgatcgtcacctccaacaccaacatgtgcgccgtgattgacgggaacagcaccaccttcgagcaccagcagccgttgcaggaccggatgttcaaatttgaactcacccgccgtctggagcatgactttggcaaggtgacaaagcaggaagtcaaagagttcttccgctgggcgcaggatcacgtgaccgaggtggcgcatgagttctacgtcagaaagggtggagccaacaagagacccgcccccgatgacgcggataaaagcgagcccaagcgggcctgcccctcagtcgcggatccatcgacgtcagacgcggaaggagctccggtggactttgccgacaggtaccaaaacaaatgttctcgtcacgcgggcatgcttcagatgctgtttccctgcaagacatgcgagagaatgaatcagaatttcaacatttgcttcacgcgcgggaccagagactgttcagaatgtttcccgggcgtgtcagaatctcaaccggtcgtcagaaagaggacgtatcggaaactctgtgccattcatcatctgctggggcgggctcccgagattgcttgctcggcctgcgatctggtcaacgtggacctggatgactgtgtttctgagcaataaatgacttaaaccaggtatggctgccgatggttatcttccagattggctcgaggacaacctctctgagggcattcgcgagtggtgggacttgaaacctggagccccgaaacccaaagccaaccagcaaaagcaggacgacggccggggtctggtgcttcctggctacaagtacctcggacccttcaacggactcgacaagggggagcccgtcaacgcggcggacgcagcggccctcgagcacgacaaggcctacgaccagcagctcaaagcgggtgacaatccgtacctgcggtataaccacgccgacgccgagtttcaggagcgtctgcaagaagatacgtcttttgggggcaacctcgggcgagcagtcttccaggccaagaagcgggttctcgaacctctcggtctggttgaggaaggcgctaagacggctcctggaaagaagagaccggtagagccatcaccccagcgttctccagactcctctacgggcatcggcaagacaggccagcagcccgcgaaaaagagactcaactttgggcagactggcgactcagagtcagtgcccgaccctcaaccaatcggagaaccccccgcaggcccctctggtctgggatctggtacaatggctgcaggcggtggcgctccaatggcagacaataacgaaggcgccgacggagtgggtagttcctcaggaaattggcattgcgattccacatggctgggcgacagagtcatcaccaccagcacccgaacctgggccctccccacctacaacaaccacctctacaagcaaatctccaacgggacatcgggaggaagcaccaacgacaacacctacttcggctacagcaccccctgggggtattttgactttaacagattccactgccacttctcaccacgtgactggcagcgactcatcaacaacaactggggattccggcccaagagactcaacttcaagctcttcaacatccaggtcaaggaggtcacgcagaatgaaggcaccaagaccatcgccaataaccttaccagcacgattcaggtctttacggactcggaataccagctcccgtacgtcctcggctctgcgcaccagggctgcccgcctccgttcccggcggacgtcttcatgattcctcagtacgggtacctgactctgaacaacggcagtcaggccgtgggccgttcctccttctactgcctggagtactttccttctcaaatgcggagaacgggcaacaactttgagttcagctaccagtttgaggacgtgccttttcacagcagctacgcgcatagccaaagcctggaccggctgatgaaccccctcatcgaccagtacctgtactacctgtctcggactcagtccacgggaggtaccgcaggaactcagcagttgctattttctcaggccgggcctaataacatgtcggctcaggccaaaaactggctacccgggccctgctaccggcagcaacgcgtctccacgacactgtcgcaaaataacaacagcaactttgcttggaccggtgccaccaagtatcatctgaatggcagagactctctggtaaatcccggtgtcgctatggcaacgcacaaggacgacgaagagcgattttttccatccagcggagtcttgatgtttgggaaacagggagctggaaaagacaacgtggactatagcagcgttatgctaaccagtgaggaagaaatcaaaaccaccaacccagtggccacagaacagtacggcgtggtggccgataacctgcaacagcaaaacgccgctcctattgtaggggccgtcaacagtcaaggagccttacctggcatggtctggcagaaccgggacgtgtacctgcagggtcctatctgggccaagattcctcacacggacggcaactttcatccttcgccgctgatgggaggctttggactgaaacacccgcctcctcagatcctgattaagaatacacctgttcccgcggatcctccaactaccttcagtcaagccaagctggcgtcgttcatcacgcagtacagcaccggacaggtcagcgtggaaattgaatgggagctgcagaaagagaacagcaagcgctggaacccagagattcagtatacttccaactactacaaatctacaaatgtggactttgctgtcaatactgagggtacttattcagagcctcgccccattggcacccgttacctcacccgtaacctgtaattgcctgttaatcaataaaccggttaattcgtttcagttgaactttggtctctgcgaagggcgaattc

SEQ ID NO: 430 - protein, 738 aa, Artificial Sequence; identical to SEQ ID NO: 418
  source: /note="Description of Artificial Sequence: Synthetic polypeptide"

SEQ ID NO: 431 - DNA, 1933 bp, Artificial Sequence
  source: /note="Description of Artificial Sequence: Synthetic polynucleotide"
  modified_base (1302)..(1302): a, c, t, or g
caaggcctacgaccagcagctcaaagcgggtgacaatccgtacctgcggtataaccacgccgacgccgagtttcaggagcgtcttcaagaagatacgtcttttgggggcaacctcgggcgagcagtcttccaggccaaaaagcgggttctcgaacctcttggtctggttgagacgccagctaagacggcacctggaaagaagcgaccggtagactcgccagactccacctcgggcatcggcaagaaaggccagcagcccgcgaaaaagagactcaactttgggcagactggcgactcagagtcagtccccgaccctcaaccaatcggagaaccaccagcaggcccctctggtctgggatctggtacaatggctgcaggcggtggcgcaccaatggctgacaataacgagggcgccgacggagtgggtaatgcctcaggaaattggcattgcgattccacatggctgggcgacagagtcatcaccaccagcacccgaacctgggccctgcccacctacaacaaccacctctacaagcaaatctccagtcagtcagcagggagcaccaacgataacgtctatttcggctacagcaccccctgggggtattttgacttcaacagattccattgccacttctcaccacgtgactggcagcgacttatcaacaacaactggggattccggcccaagaagctcaacttcaagctcttcaacatccaggtcaaggaggtcacgacgaatgacggtgtcacaaccatcgctaataaccttaccagcacggttcaggtcttttcggactcggaatatcaactgccgtacgtcctcggctccgcgcaccagggctgcctgcctccgttcccggcagacgtgttcatgattccgcagtacggatacctgactctgaacaatggcagccaatcggtaggccgttcctccttctactgcctggagtactttccttctcagatgctgagaacgggcaacaacttcacctttagctacaccttcgaggacgtgcctttccacagcagctacgcgcacagccagagtctggaccggctgatgaatcccctcatcgaccagtacctgtactacttggccagaacacagagcaacgcaggaggtactgctggcaatcgggaactgcagttttatcagggcggacctaccaccatggccgaacaagcaaagaactggctgcccggaccttgcttccggcaacagagagtatccaagacgctggatcaaaataacaacagcaactttgcctggactggtgccacaaaataccatttaaatgnaagaaattcattggttaatcccggtgtcgccatggcaacccacaaggacgacgaggaacgcttcttcccttcgagcggagttctaatttttggcaaaactggagcagctaataaaactacattagaaaacgtgctcatgacaaatgaagaagaaattcgtcctaccaacccggtagctaccgaggaatacgggattgtaagcagcaacttgcaggcggctagcaccgcagcccagacacaagttgttaacaaccagggagccttacctggcatggtctggcagaaccgggacgtgtacctgcaaggtcccatttgggccaagattcctcacacggacggcaactttcacccgtctcctctaatgggtggctttggactgaaacacccgcctccccagatcctgatcaaaaacacaccggtacctgctaatcctccagaagtgtttactcctgccaagtttgcttccttcatcacgcagtacagcaccgggcaagtcagcgttgagatcgagtgggagctgcagaaagagaacagcaagcgctggaacccagagattcagtacacctccaactttgacaaacagactggagtggactttgctgttgacagccagggtgtttactctgagcct

SEQ ID NO: 432 - protein, 733 aa, Artificial Sequence
  source: /note="Description of Artificial Sequence: Synthetic polypeptide"
MAADGYLPDWLEDNLSEGIREWWDLKPGAPKPKANQQKQDDGRGLVLPGYKYLGPFNGLDKGEPVNAADAAALEHDKAYDQQLKAGDNPYLRYNHADAEFQERLQEDTSFGGNLGRAVFQAKKRVLEPLGLVEEGAKTAPGKKRPLESPQEPDSSSGIGKKGKQPAKKRLNFEEDTGAGDGPPEGSDTSAMSSDIEMRAAPGGNAVDAGQGSDGVGNASGDWHCDSTWSEGKVTTTSTRTWVLPTYNNHLYLRLGTTSNSNTYNGFSTPWGYFDFNRFHCHFSPRDWQRLINNNWGLRPKAMRVKIFNIQVKEVTTSNGETTVANNLTSTVQIFADSSYELPYVMDAGQEGSLSPFPNDVFMVPQYGYCGIVTGENQNQTDRNAFYCLEYFPSQMLRTGNNFEMAYNFGKVPFHSMYAYSQSPDRLMNPLLDQYLWHLQSTTSGETLNQGNAATTFGKIRSGDFAFYRKNWLPGPCVKQQRLSKTASQNYKIPASGGNALLKYDTHYTLNNRWSNIAPGPPMATAGPSDGDFSNAQLIFPGPSVTGNTTTSANNLLFTSEEEIAATNPRDTDMFGQIADNNQNATTAPITGNVTAMGVLPGMVWQNRDIYYQGPIWAKIPHADGHFHPSPLIGGFGLKHPPPQIFIKNTPVPANPATTFTAARVDSFITQYSTGQVAVQIEWEIEKERSKRWNPEVQFTSNYGNQSSMLWAPDTTGKYTEPRVIGSRYLTNHL

SEQ ID NO: 433 - DNA, 3105 bp, Artificial Sequence
  source: /note="Description of Artificial Sequence: Synthetic polynucleotide"
gaattcgcccttgctgcgtcaactggaccaatgagaactttcccttcaacgattgcgtcgacaagatggtgatctggtgggaggagggcaagatgaccgccaaggtcgtggagtccgccaaggccattctgggcggaagcaaggtgcgcgtggaccaaaagtgcaagtcatcggcccagatcgaccccacgcccgtgatcgtcacctccaacaccaacatgtgcgccgtgatcgacgggaacagcaccaccttcgagcaccagcagccgctgcaggaccgcatgttcaagttcgagctcacccgccgtctggagcacgactttggcaaggtgaccaagcaggaagtcaaagagttcttccgctgggctcaggatcacgtgactgaggtggcgcatgagttctacgtcagaaagggcggagccaccaaaagacccgcccccagtgacgcggatataagcgagcccaagcgggcctgcccctcagttgcggagccatcgacgtcagacgcggaagcaccggtggactttgcggacaggtaccaaaacaaatgttctcgtcacgcgggcatgcttcagatgctgtttccctgcaagacatgcgagagaatgaatcagaatttcaacgtctgcttcacgcacggggtcagagactgctcagagtgcttccccggcgcgtcagaatctcaacccgtcgtcagaaaaaagacgtatcagaaactgtgcgcgattcatcatctgctggggcgggcacccgagattgcgtgttcggcccgcgatctcgtcaacgtggacttggatgactgtgtttctgagcaataaatgacttaaaccaggtatggctgctgacggttatcttccagattggctcgaggacaacctctctgagggcattcgcgagtggtgggacctgaaacctggagcccccaagcccaaggccaaccagcagaagcaggacgacggccggggtctggtgcttcctggctacaagtacctcggacccttcaacggactcgacaagggggagcccgtcaacgcggcggacgcagcggccctcgagcacgacaaggcctacgaccagcagctcaaagcgggtgacaatccgtacctgcggtataaccacgccgacgccgagtttcaggagcgtctgcaagaagatacgtcttttgggggcaacctcgggcgagcagtcttccaggccaagaagagggtactcgaacctctgggcctggttgaagaaggtgctaagacggctcctggaaagaagagaccgttagagtcaccacaagagcccgactcctcctcaggaatcggcaaaaaaggcaaacaaccagccaaaaagagactcaactttgaagaggacactggagccggagacggaccccctgaaggatcagataccagcgccatgtcttcagacattgaaatgcgtgcagcaccgggcggaaatgctgtcgatgcgggacaaggttccgatggagtgggtaatgcctcgggtgattggcattgcgattccacctggtctgagggcaaggtcacaacaacctcgaccagaacctgggtcttgcccacctacaacaaccacttgtacctgcggctcggaacaacatcaaacagcaacacctacaacggattctccaccccctggggatactttgactttaacagattccactgtcacttctcaccacgtgactggcaaagactcatcaacaacaactggggactacgaccaaaagccatgcgcgttaaaatcttcaatatccaagttaaggaggtcacaacgtcgaacggcgagactacggtcgctaataaccttaccagcacggttcagatatttgcggactcgtcgtatgagctcccgtacgtgatggacgctggacaagagggaagtctgtctcctttccccaatgacgtcttcatggtgcctcaatatggctactgtggcattgtgactggcgaaaatcagaaccagacggacagaaatgctttctactgcctggagtattttccttcacaaatgctgagaactggcaataactttgaaatggcttacaactttgggaaggtgccgttccactcaatgtatgcttacagccagagcccggacagactgatgaatcccctcctggaccagtacctgtggcacttacagtcgaccacctctggagagactctgaatcaaggcaatgcagcaaccacatttggaaaaatcaggagtggagactttgccttttacagaaagaactggctgcctgggccttgtgttaaacagcagagactctcaaaaactgccagtcaaaattacaagattcctgccagcgggggcaacgctctgttaaagtatgacacccactataccttaaacaaccgctggagcaacatagcgcctggacctccaatggcaacagctggaccttcagatggggacttcagcaacgcccagctcatcttccctggaccatcagtcaccggaaacacaacaacctcagcaaacaatctgttgtttacatcagaagaagaaattgctgccaccaacccaagagacacggacatgtttggtcagattgctgacaataatcagaatgctacaactgctcccataaccggcaacgtgactgctatgggagtgcttcctggcatggtgtggcaaaacagagacatttactaccaagggccaatttgggccaagatcccacacgcggacggacattttcatccttcaccgctaattggcggttttggactgaaacatccgcctccccagatatttatcaaaaacacccccgtacctgccaatcctgcgacaaccttcactgcagccagagtggactctttcatcacacaatacagcaccggccaggtcgctgttcagattgaatgggaaatcgaaaaggaacgctccaaacgctggaatcctgaagtgcagtttacttcaaactatgggaaccagtcttctatgttgtgggctcccgatacaactgggaagtatacagagccgcgggttattggctctcgttatttgactaatcatttgtaactgcctagttaatcaataaaccgtgtgattcgtttcagttgaactttggtctctgcgaagggcgaattc

SEQ ID NO: 434 - protein, 733 aa, Artificial Sequence
  source: /note="Description of Artificial Sequence: Synthetic polypeptide"
MAADGYLPDWLEDNLSEGIREWWDLKPGAPKPKANQQKQDDGRGLVLPGYKYLGPFNGLDKGEPVNAADAAALEHDKAYDQQLKAGDNPYLRYNHADAEFQERLQEDTSFGGNLGRAVFQAKKRVLEPLGLVEEGAKTAPGKKRPLESPQEPDSSSGIGKKGKQPAKKRLNFEEDTGAGDGPPEGSDTSAMSSDIEMRAAPGGNAVDAGQGSDGVGNASGDWHCDSTWSEGKVTTTSTRTWVLPTYNNHLYLRLGTTSNSNTYNGFSTPWGYFDFNRFHCHFSPRDWQRLINNNWGLRPKAMRVKIFNIQVKEVTTSNGETTVANNLTSTVQIFADSSYELPYVMDAGQEGSLPPFPNDVFMVPQYGYCGIVTGENQNQTDRNAFYCLEYFPSQMLRTGNNFEMAYNFEKVPFHSMYAHSQSLDRLMNPLLDQYLWHLQSTTSGETLNQGNAATTFGKIRSGDFAFYRKNWLPGPCVKQQRFSKTASQNYKIPASGGNALLKYDTHYTLNNRWSNIAPGPPMATAGPSDGDFSNAQLIFPGPSVTGNTTTSANNLLFTSEEEIAATNPRDTDMFGQIADNNQNATTAPITGNVTAMGVLPGMVWQNRDIYYQGPIWAKIPHADGHFHPSPLIGGFGLKHPPPQIFIKNTPVPANPATTFTAARVDSFITQYSTGQVAVQIEWEIEKERSKRWNPEVQFTSNYGNQSSMLWAPDTTGKYTEPRVIGSRYLTNHL

SEQ ID NO: 435 - DNA, 3105 bp, Artificial Sequence
  source: /note="Description of Artificial Sequence: Synthetic polynucleotide"
gaattcgcccttgctgcgtcaactggaccaatgagaactttcccttcaacgattgcgtcgacaagatggtgatctggtgggaggagggcaagatgaccgccaaggtcgtggagtccgccaaggccattctgggcggaagcaaggtgcgcgtggaccaaaagtgcaagtcatcggcccagatcgaccccacgcccgtgatcgtcacctccaacaccaacatgtgcgccgtgatcgacgggaacagcaccaccttcgagcaccagcagccgctgcaggaccgcatgttcaagttcgagctcacccgccgtctggagcacgactttggcaaggtgaccaagcaggaagtcaaagagttcttccgctgggctcaggatcacgtgactgaggtggcgcatgagttctacgtcagaaagggcggagccaccaaaagacccgcccccagtgacgcggatataagcgagcccaagcgggcctgcccctcagttgcggagccatcgacgtcagacgcggaagcaccggtggactttgcggacaggtaccaaaacaaatgttctcgtcacgcgggcatgcttcagatgctgtttccctgcaagacatgcgagagaatgaatcagaatttcaacgtctgcttcacgcacggggtcagagactgctcagagtgcttccccggcgcgtcagaatctcaacccgtcgtcagaaaaaagacgtatcagaaactgtgcgcgattcatcatctgctggggcgggcacccgagattgcgtgttcggcctgcgatctcgtcaacgtggacttggatgactgtgtttctgagcaataaatgacttaaaccaggtatggctgctgacggttatcttccagattggctcgaggacaacctctctgagggcattcgcgagtggtgggacctgaaacctggagcccccaagctcaaggccaaccagcagaagcaggacgacggccggggtctggtgcttcctggctacaagtacctcggacccttccacggactcgacaagggggagcccgtcaacgcggcggacgcagcggccctcgagcacgacaaggcctacgaccagcagctcaaagcgggtgacaatccgtacctgcggtataaccacgccgacgccgagtttcaggagcgtctgcaagaagatacgtcttttgggggcaacctcgggcgagcagtcttccaggccaagaagagggtactcgaaccactgggcctggttgaagaaggtgctaagacggctcctggaaagaagagaccgttagagtcaccacaagagcccgactcctcctcaggaatcggcaaaaaaggcaaacaaccagccaaaaagagactcaactttgaagaggacactggagccggagacggaccccctgaaggatcagataccagcgccatgtcttcagacattgaaatgcgtgcagcaccgggcggaaatgctgtcgatgcgggacaaggttccgatggagtgggtaatgcctcgggtgattggcattgcgattccacctggtctgagggcaaggtcacaacaacctcgaccagaacctgggtcttgcccacctacaacaaccacttgtacctgcggctcggaacaacatcaaacagcaacacctacaacggattctccaccccctggggatactttgactttaacagattccactgtcacttctcaccacgtgactggcaaagactcatcaacaacaactggggactacgaccaaaagccatgcgcgttaaaatcttcaatatccaagttaaggaggtcacaacgtcgaacggcgagactacggtcgctaataaccttaccagcacggttcagatatttgcggactcgtcgtatgagctcccgtacgtgatggacgctggacaagagggaagtctgcctcctttccccaatgacgtcttcatggtgcctcaatatggctactgtggcattgtgactggcgaaaatcagaaccagacggacagaaatgctttctactgcctggagtattttccttcacaaatgctgagaactggcaataactttgaaatggcttacaactttgagaaggtgccgttccactcaatgtatgctcacagccagagcctggacagactgatgaatcccctcctggaccagtacctgtggcacttacagtcgaccacctctggagagactctgaatcaaggcaatgcagcaaccacatttggaaaaatcaggagtggagactttgccttttacagaaagaactggctgcctgggccttgtgttaaacagcagagattctcaaaaactgccagtcaaaattacaagattcctgccagcgggggcaacgctctgttaaagtatgacacccactataccttaaacaaccgctggagcaacatagcgcctggacctccaatggcaacagctggaccttcagatggggacttcagcaacgcccagctcatcttccctggaccatcagtcaccggaaacacaacaacctcagcaaacaatctgttgtttacatcagaaggagaaattgctgccaccaacccaagagacacggacatgtttggtcagattgctgacaataatcagaatgctacaactgctcccataaccggcaacgtgactgctatgggagtgcttcctggcatggtgtggcaaaacagagacatttactaccaagggccaatttgggccaagatcccacacgcggacggacattttcatccttcaccgctaattggcggttttggactgaaacatccgcctccccagatatttatcaaaaacacccccgtacctgccaatcctgcgacaaccttcactgcagccagagtggactctttcatcacacaatacagcaccggccaggtcgctgttcagattgaatgggaaatcgaaaaggaacgctccaaacgccggaatcctgaagtgcagtttacttcaaactatgggaaccagtcttctatgttgtgggctcccgatacaactgggaagtatacagagccgcgggttattggctctcgttatttgactaatcatttgtaactgcctagttaatcaataaaccgtgtgattcgtttcagttgaactttggtctctgcgaagggcgaattc

SEQ ID NO: 436 - protein, 733 aa, Artificial Sequence
  source: /note="Description of Artificial Sequence: Synthetic polypeptide"
MAADGYLPDWLEDNLSEGIREWWDLKPGAPKPKANQQKQDDGRGLVLPGYEYLGPFNGLDKGEPVNAADAAALEHDKAYDQQLKAGDNPYLRYNHADAEFQERLQEDTSFGGNLGRAVFQAKKRVLEPLGLVEEGAKTAPGKKRPLESPQEPDSSSGIGKKGKQPAKKRLNFEEDTGAGDGPPEGSDTSAMSSDIEMRAAPGGNAVDAGQGSDGVGNASGDWHCDSTWSEGKVTTTSTRTWVLPTYNNHLYLRLGTTSNSNTYNGFSTPWGYFDFNRFHCHFSPRDWQRLINNNWGLRPKAMRVKIFNIQVKEVTTSNGETTVANNLTSTVQIFADSSYELPYVMDAGQEGSLPPFPNDVFMVPQYGYCGIVTGENQNQTDRNAFYCLEYFPSQMLRTGNNFETAYNFEKVPFHSMYAHSQSLDGLMNPLLDQYLWHLQSTTSGETLNQGNAATTFGKIRSGDFAFYRKNWLPGPCVKQQRFSKTASQNYKIPASGGNALLKYDTHYTLNNRWSNIAPGPPMATAGPSDGDFSNAQLIFPGPSVTGNTTTSANNLLFTSEEEIAATNPRDTDMFGQIADNNQNATTAPITGNVTAMGVLPGMVWQNRDIYYQGPIWAKIPHADGHFHPSPLIGGFGLKHPPPQIFIKNTPVPAYPATTFTAARVDSFITQYSTGQVAVQIEWEIEKERSKRWNPEVQFTSNCGNQSSMLWAPDTTGKYTEPRVIGSRYLTNHL

SEQ ID NO: 437 - DNA, 3105 bp, Artificial Sequence
  source: /note="Description of Artificial Sequence: Synthetic polynucleotide"
gaattcgcccttcgcagagaccaaagttcaactgaaacgaatcacacggtttattgattaactaggcagttacaaatgattagtcaaataacgagagccaataacccgcggctctgtatacttcccagttgtatcgggagcccacaacatagaagactggttcccacagtttgaagtaaactgcacttcaggattccagcgtttggagcgttccttttcgatttcccattcaatctgaacagcgacctggccggtgctgtattgtgtgatgaaagagtccactctggctgcagtgaaggttgtcgcaggataggcaggtacgggggtgtttttgataaatatctggggaggcggatgtttcagtccaaaaccgccaattagcggtgaaggatgaaaatgtccgtccgcgtgtgggatcttggcccaaattggcccttggtagtaaatgtctctgttttgccacaccatgccaggaagcactcccatagcagtcacgttgccggttatgggagcagttgtagcattctgattattgtcagcaatctgaccaaacatgtccgtgtctcttgggttggtggcagcaatttcttcttctgatgtaaacaacagattgtttgctgaggttgttgtgtttccggtgactgatggtccagggaagatgagctgggcgttgctgaagtccccatctgaaggtccagctgttgccattggaggtccaggcgctatgttgctccagcggttgtttaaggtatagtgggtgtcatactttaacagagcgttgcccccgctggcaggaatcttgtaattttgactggcagtttttgagaatctctgctgtttaacacaaggcccaggcagccagttctttctgtaaaaggcaaagtctccactcctgatttttccaaatgtggttgctgcattgccttgattcagagtctctccagaggtggtcgactgtaagtgccacaggtactggtccaggaggggattcatcagtccgtccaggctctggctgtgagcatacattgagtggaacggcaccttctcaaagttgtaagccgtttcaaagttattgccagttctcagcatttgtgaaggaaaatactccaggcagtagaaagcatttctgtccgtctggttctgattttcgccagtcacaatgccacagtagccatattgaggcaccatgaagacgtcattggggaaaggaggcagacttccctcttgtccagcgtccatcacgtacgggagctcatacgacgagtccgcaaatatctgaaccgtgctggtaaggttattagcgaccgtagtctcgccgttcgacgttgtgacctccttaacttggatattgaagattttaacgcgcatggcttttggtcgtagtccccagttgttgttgatgagtctttgccagtcacgtggtgagaagtgacagtggaatctgttaaagtcaaagtatccccagggggtggagaatccgttgtaggtgttgctgtttgatgttgttccgagccgcaggtacaagtggttgttgtaggtgggcaagacccaggttctggtcgaggttgttgtgaccttgccctcagaccaggtggaatcgcaatgccaatcacccgaggcattacccactccatcggaaccttgtcccgcatcgacagcatttccgcccggtgctgcacgcatttcaatgtctgaagacatggcgctggtatctgatccttcagggggtccgtctccggctccagtgtcctcttcaaagttgagtctctttttggctggttgtttgccttttttgccgattcctgaggaggagtcgggctcttgtggtgactctaacggtctcttctttccaggagccgtcttagcaccttcttcaaccaggcccagaggttcgagtaccctcttcttggcctggaagactgctcgcccgaggttgcccccaaaagacgtatcttcttgcagacgctcctgaaactcggcgtcggcgtggttataccgcaggtacggattgtcacccgctttgagctgctggtcgtaggccttgtcgtgctcgagggccgctgcgtccgccgcgttgacgggctcccccttgtcgagtccgttgaagggtccgaggtactcgtagccaggaagcaccagaccccggccgtcgtcctgcttctgctggttggccttgggcttgggggctccaggtttcaggtcccaccactcgcgaatgccctcagagaggttgtcctcgagccaatctggaagataaccgtcagcagccatacctggtttaagtcatttattgctcagaaacacagtcatccaagtccacgttgacgagatcgcaggccgaacacgcaatctcgggtgcccgccccagcagatgatgaatcgcgcacagtttctgatacgtcttttttctgacgacgggttgagattctgacgcgccggggaagcactctgagcagtctctgaccccgtgcgtgaagcagacgttgaaattctgattcattctctcgcatgtcttgcagggaaacagcatctgaagcatgcccgcgtgacgagaacatttgttttggtacctgtccgcaaggtccaccggtgcttccgcgtctgacgtcgatggctccgcaactgaggggcaggcccgcttgggctcgcttatatccgcgtcactgggggcgggtcttttggtggctccgccctttctgacgtagaactcatgcgccacctcagtcacgtgatcctgagcccagcggaagaactctttgacttcctgcttggtcaccttgccaaagtcgtgctccagacggcgggtgagctcgaacttgaacatgcggtcctgcagcggctgctggtgctcgaaggtggtgctgttcccgtcgatcacggcgcacatgttggtgttggaggtgacgatcacgggcgtggggtcgatctgggccgatgacttgcacttttggtccacgcgcaccttgcttccgcccagaatggccttggcggactccacgaccttggcggtcatcttgccctcctcccaccagatcaccatcttgtcgacgcaatcgttgaagggaaagttctcattggtccagttgacgcagcaagggcgaattc

SEQ ID NO: 438 - protein, 729 aa, Artificial Sequence
  source: /note="Description of Artificial Sequence: Synthetic polypeptide"
MAADGYLPDWLEDNLSEGIREWWDLKPGAPKPKANQQKQDDGRGLVLPGYKYLGPFNGLDKGEPVNAADAAALEHDKAYDQQLKAGDNPYLRYNHADAEFQERLQEDTSFGGNLGRAVFQAKKRVLEPLGLVEEGAKTAPGKKRPIDSPDSSTGIGKKGQQPAKKKLNFGQTGDSESVPDPQPLGEPPAAPSSVGSGTMAAGGGAPMADNNEGADGVGNASGNWHCDSTWLGDRVITTSTRTWALPTYNNHLYKQISSSSSGATNDNHYFGYSTPWGYFDFNRFHCHFSPRDWQRLINNNWGFRPKKLRFKLFNIQVKEVTTNDGVTTIANNLTSTVQVFSDSEYQLPYVLGSAHQGCLPPFPADVFMIPQYGYLTLNNGSQSVGRSSFYCLEYFPSQMLRTGNNFEFSYSFEDVPFHSSYAHSQSLDRLMNPLIDQYLYYLARTQSTTGSTRELQFHQAGPNTMAEQSKNWLPGPCYRQQGLSKNLDFNNNSNFAWTAATKYHLNGRNSLTNPGIPMATNKDDEDQFFPINGVLVFGKTGAANKTTLENVLMTSEEEIKTTNPVATEEYGVVSSNLQPSTAGPQSQTINSQGALPGMVWQNRDVYLQGPIWAKIPHTDGNFHPSPLMGGFGLKHPPPQILIKNTPVPANPPEVFTPAKFASFITQYSTGQVSVEIEWELQKENSKRWNPEIQYTSNYAKSNNVEFAVNPDGVYTEPRPIGTRYLPRNL

SEQ ID NO: 439 - DNA, 3094 bp, Artificial Sequence
  source: /note="Description of Artificial Sequence: Synthetic polynucleotide"
gaattcgcccttgctgcgtcaactggaccaagagaactttcccttcaacgattgcgtcgacaagatggtgatctggtgggaggagggcaagatgacggccaaggtcgtggagtccgccaaagccattctgggcggaagcaaggtgcgcgtcgaccaaaagtgcaagtcctcggcccagatcgatcccacccccgtgatcgtcacctccaacaccaacatgtgcgccgtgatcgacgggaacagcaccaccttcgagcaccagcagccgttgcaggaccggatgttcaaatttgaactcacccgccgtctggaacacgactttggcaaggtgaccaagcaggaagtcaaagagttcttccgctgggctagtgatcacgtgactgaggtgacgcatgagttctacgtcagaaagggcggagccagcaaaagacccgcccccgatgacgcggatataagcgagcccaagcgggcctgtccctcagtcacggacccatcgacgtcagacgcggaaggagctccggtggactttgccgacaggtaccaaaacaaatgttctcgtcacgcgggcatgcttcagatgctgtttccctgcaaaacgtgcgagagaatgaatcagaatttcaacatttgcttcacgcacggggtcagagactgtttagaatgtttccccggcgtgtcagaatctcaaccggtcgtcagaaaaaagacgtatcggaagctgtgtgcgattcatcatctgctggggcgggcacccgagattgcttgctcggcctgcgacctggtcaacgtggacctggacgactgtgtttctgagcaataaatgacttaaaccgggtatggctgccgatggttatcttccagattggctcgaggacaacctctctgagggcattcgcgagtggtgggacctgaaacctggagccccgaaacccaaagccaaccagcaaaagcaggacgacggccggggtctggtgcttcctggctacaagtacctcggacccttcaacggactcgacaagggggagcccgtcaacgcggcggacgcagcggccctcgagcacgacaaggcctacgaccagcagctcaaagcgggtgacaatccgtacctgcggtataaccacgccgacgccgagtttcaggagcgtctgcaagaagatacgtcatttgggggcaacctcgggcgagcagtcttccaggccaagaagcgggttctcgaacctctcggtctggttgaggaaggcgctaagacggctcctggaaagaagagacccatagactctccagactcctccacgggcatcggcaaaaaaggccagcagcccgctaaaaagaagctcaattttggtcagactggcgactcagagtcagtccccgaccctcaacctcttggagaacctccagcagcgccctctagtgtgggatctggtacaatggctgcaggcggtggcgcaccaatggcagacaataacgaaggtgccgacggagtgggtaatgcctcaggaaattggcattgcgattccacatggctgggcgacagagtcatcaccaccagcaccagaacctgggccctccccacctacaacaaccacctctacaagcaaatctccagcagcagctcaggagccaccaatgacaaccactacttcggctacagcaccccctgggggtattttgactttaacagattccactgccacttctcaccacgtgactggcagcgactcatcaacaacaactggggattccggcccaagaagctgcggttcaagctcttcaacatccaggtcaaggaggtcacaacgaatgacggcgtcacgaccatcgctaataaccttaccagcacggttcaggtcttctcggactcggaataccagctgccgtacgtcctcggctctgcgcaccagggctgcctgcctccgttcccggcggacgtcttcatgattcctcagtacggctacctgactctgaacaacggcagccaatcggtgggccgttcctccttctactgcctggaatatttcccctctcaaatgctgagaacgggcaacaactttgagttcagttacagcttcgaggacgtgcctttccacagcagctacgcgcacagccagagcctagaccggctgatgaaccctctcatcgaccagtacctgtactacctggcccggacccagagcaccacgggttccaccagggaactgcaatttcatcaagctgggcccaatactatggccgagcagtcaaagaactggctgcctggaccctgctataggcaacagggactgtcaaagaacttggactttaacaacaacagcaattttgcctggactgctgccactaaatatcatctgaatggcagaaactctttgaccaatcctggcattcccatggcaaccaacaaggatgatgaggaccagttctttcccatcaacggggtactggtttttggcaagacgggagctgccaacaaaactacgctggaaaacgttctgatgaccagcgaggaggagatcaagaccactaaccctgtggctacagaagaatacggtgtggtctccagcaacctgcagccgtctacagccgggcctcaatcacagactatcaacagccagggagcactgcctggcatggtctggcagaaccgggacgtgtatctgcagggtcccatctgggccaaaattcctcacacggatggcaactttcacccgtctcctctgatgggcggttttggactcaaacacccgcctccacagatcctgatcaaaaacacacctgtacctgctaatcctccggaggtgtttactcctgccaagtttgcctccttcatcacgcagtacagcaccggacaagtcagcgtggaaatcgagtgggagctgcagaaagaaaacagcaagcgctggaacccagaaattcagtatacttccaattatgccaagtctaataatgttgaatttgctgtgaaccctgatggtgtttatactgagcctcgccccattggcactcgttacctcccccgtaatctgtaattgcttgttaatcaataaaccggttgattcgtttcagttgaactttggtctctgcgaagggcgaattc

SEQ ID NO: 440 - protein, 1458 aa, Artificial Sequence
  source: /note="Description of Artificial Sequence: Synthetic polypeptide"
MAADGYLPDWLEDNLSEGIREWWDLKPGAPKPKANQQKQDDGRGLVLPGYKYLGPFNGLDKGEPVNAADAAALEHDKAYDQQLKAGDNPYLRYNHADAEFQERLQEDTSFGGNLGRAVFQAKKRVLEPLGLVEEGAKTAPGKKRPIDSPDSSTGIGKKGQQPAKKKLNFGQTGDSESVPDPQPLGEPPAAPSSVGSGTMAAGGGAPTADNNEGADGVGNASGNWHCDSTWLGDRVITTSTRTWALPTYNNHLYKQISSSSSGATNDNHYFGYSTPWGYFDFNRFHCHFSPRDWQRLINNNWGFRPKKLRFKLFNIQVKEVTTNDGVTTIANNLTSTVQVFSDSEYQLPYVLGSAHQGCLPPFPADVFMIPQYGYLTLNNGSQSVGRSSFYCLEYFPSQMLRTGNNFEFSYSFEDVPFHSSYAHSQSLDRLMNPLIDQYLYYLARTQSTTGSTRELQFHQAGPNTMAEQSKNWLPGPCYRQQRLSKNLDFNNNSNFAWTAATKYHLNGRNSLTNPGIPMATNKDDEDQFFPINGVLVFGKTGAANKTTLENVLMTSEEEIKTTNPVATEEYGVVSSNLQSSTAGPQSQTINSQGALPGMVWQNRDVYLQGPIWAKIPHTDGNFHPSPLMGGFGLEHPPPQILIKNTPVPANPPEVFTPAKFASFITQYSTGQVSVEIEWELQKENSKRWNPEIQYTSNYAKSNNVEFAVNPDGVYTEPRPIGTRYLTRNLMAADGYLPDWLEDNLSEGIREWWDLKPGAPKPKANQQKQDDGRGLVLPGYKYLGPFNGLDKGEPVNAADAAALEHDKAYDQQLKAGDNPYLRYNHADAEFQERLQEDTSFGGNLGRAVFQAKKRVLEPLGLVEEGAKTAPGKKRPIGSPDSSTGIGKKGQQPAKKKLNFGQTGDSESVPDPQPLGEPPAAPSSVGSGTMAAGGGAPMADNNEGADGVGNASGNWHCDSTWLGDRVITTSTRTWALPTYNNHLYKQISSSSSGATNDNHYFGYSTPWGYFDFNRFHCHFSPRDWQRLINNNWGFRPKKLRFKLLNIQVKEVTTNDGVTTIANNLTSTVQVFSDSEYQLPYVLGSAHQGCLPPFPADVFMIPQYGYLTLDNGSQSVGRSSFYCLEYFPSQMLRTGNNFEFSYSFEDVPFHSSYAHSQSLDRLMNPLIDQYLYYLARTQSTTGSTRELQFHQAGPNTMAEQSKNWLPGPCYRQQRLSKNLDFNNNSNFAWTAATKYHLNGRNSLTNPGIPMATNKDDEDQFFPINGVLVFGKTGAANKTTLENVLMTSEEEIKTTNPVATEEYGVVSSNLQSSTAGPQSQTINSQGALPGMVWQNRDVYLQGPIWAKIPHTDGNFHPSPLMGGFGLKHPPPQILIKNTPVPANPPEVFTPAKFASFITQYSTGQVSVEIEWELQKENSKRWNPEIQYTSNYAKSNNVEFAVNPDGVYTEPRPIGTRYLTRNL

SEQ ID NO: 441 - DNA, 3095 bp, Artificial Sequence
  source: /note="Description of Artificial Sequence: Synthetic polynucleotide"
gaattcgcccttcgcagagaccaaagttcaactgaaacgaatcaaccggtttattgattaacaagcaattacagattacgggtgaggtaacgagtgccaatggggcgaggctcagtataaacaccatcagggttcacagcaaattcaacattattagacttggcataattggaagtatactgaatttctgggttccagcgcttgctgttttctttctgcagctcccactcgatttccacgctgacttgtccggtgctgtactgcgtgatgaaggaggcaaacttggcaggagtaaacacctccggaggattagcaggtacaggtgtgtttttgatcaggatctgtggaggcgggtgtttgagtccaaaaccgcccatcagaggagacgggtgaaagttgccatccgtgtgaggaattttggcccagatgggaccctgcagatacacgtcccggttctgccagaccatgccaggcagtgctccctggctgttgatagtctgtgattgaggcccggctgtagacgactgcaggttgctggagaccacaccgtattcttctgtagccacagggttagtggtcttgatctcctcctcgctggtcatcagaacgttttccagcgtagttttgttggcagctcccgtcttgccaaaaaccagtaccccgttgatgggaaagaactggtcctcatcatccttgttggttgccatgggaatgccaggattggtcaaagagtttctgccattcagatgatatttagtggcagcagtccaggcaaaattgctgttgttgttaaagtccaagttctttgacagtctctgttgcctatagcagggtccaggcagccagttctttgactgctcggccatagtattgggcccagcttgatgaaattgcagttccctggtggaacccgtggtgctctgggtccgggccaggtagtacaggtactggtcgatgagagggttcatcagccggtctaggctctggctgtgcgcgtagctgctgtggaaaggcacgtcctcgaagctgtaactgaactcaaagttgttgcccgttctcagcatttgagaggggaaatattccaggcagtagaaggaggaacggcccaccgattggctgccgttgtccagagtcaggtagccgtactgaggaatcatgaagacgtccgccgggaacggaggcaggcagccctggtgcgcagagccgaggacgtacggcagctggtattccgagtccgagaagacctgaaccgtgctggtaaggttattagcgatggtcgtgacgccgtcattcgttgtgacctccttgacctggatgttgaggagcttgaaccgcagcttcttgggccggaatccccagttgttgttgatgagtcgctgccagtcacgtggtgagaagtggcagtggaatctgttaaagtcaaaatacccccagggggtgctgtagccgaagtagtggttgtcattggtggctcctgagctgctgctggagatttgcttgtagaggtggttgttgtaggtggggagggcccaggttctggtgctggtggtgatgactctgtcgcccagccatgtggaatcgcaatgccaatttcctgaggcattacccactccgtcggcaccttcgttattgtctgccattggtgcgccaccgcctgcagccattgtaccagatcccacactagagggcgctgctggaggttctccaagaggttgagggtcggggactgactctgagtcgccagtctgaccaaaattgagcttctttttagcgggctgctggccttttttgccgatgcccgtggaggagtctggagagcctatgggtctcttctttccaggagccgtcttagcgccttcctcaaccagaccgagaggttcgagaacccgcttcttggcctggaagactgctcgcccgaggttgcccccaaatgacgtatcttcttgcagacgctcctgaaactcggcgtcggcgtggttataccgcaggtacggattgtcacccgctttgagctgctggtcgtaggccttgtcgtgctcgagggccgctgcgtccgccgcgttgacgggctcccccttgtcgagtccgttgaagggtccgaggtacttgtagccaggaagcaccagaccccggccgtcgtcctgcttttgctggttggctttgggtttcggggctccaggtttcaggtcccaccactcgcgaatgccctcagagaggttgtcctcgagccaatctggaagataaccatcggcagccatacctggtttaagtcatttattgctcagaaacacagtcgtccaggtccacgttgaccaggtcgcaggccgagcaagcaatctcgggtgcccgccccagcagatgatgaatcgcacacagcttccgatacgtcttttttctgacgaccggttgagattctgacacgccggggaaacattctaaacagtctctgaccccgtgcgtgaagcaaatgttgaaattctgattcattctctcgcacgttttgcagggaaacagcacctgaagcatgcccgcgtgacgagaacatttgttttggtacctgtcggcaaagtccaccggagctccttccgcgtctgacgtcgatgggtccgtgactgagggacgggcccgcttgggctcgcttatatccgcgtcatcgggggcgggtcttttgctggctccgccctttctgacgtagaactcatgcgtcacctcagtcacgtgatcactagcccagcggaagaactctttgacttcctgctttgtcaccttgccaaagtcgtgttccagacggcgggtgagttcaaatttgaacatccggtcctgcaacggttgctggtgctcgaaggtggtgctgttcccgtcgatcacggcgcacatgttggtgttggaggtgacgatcacgggggtgggatcgatctgggcggacgacttgcacttttggtccacgcgcaccttgctgccgccgagaatggccttggcggactccacgaccttggccgtcatcttgccctcctcccaccagatcaccatcttgtcgacgcaatcgttgaagggaaagttctcattggtccagttgacgcagcaagggcgaattc

SEQ ID NO: 442 - DNA, 3095 bp, Artificial Sequence
  source: /note="Description of Artificial Sequence: Synthetic polynucleotide"
gaattcgcccttcgcagagaccaaagttcaactgaaacgaatcaaccggtttattgattaacaagcaattacagattacgggtgaggtaacgagtgccaatggggcgaggctcagtataaacaccatcagggttcacagcaaattcaacattattagacttggcataattggaagtatactgaatttctgggttccagcgcttgctgttttctttctgcagctcccactcgatttccacgctgacttgtccggtgctgtactgcgtgatgaaggaggcaaacttggcaggagtaaacacctccggaggattagcaggtacaggtgtgtttttgatcaggatctgtggaggcgggtgttcgagtccaaaaccgcccatcagaggagacgggtgaaagttgccatccgtgtgaggaattttggcccagatgggaccctgcagatacacgtcccggttctgccagaccatgccaggcagtgctccctggctgttgatagtctgtgattgaggcccggctgtagacgactgcaggttgctggagaccacaccgtattcttctgtagccacagggttagtggtcttgatctcctcctcgctggtcatcagaacgttttccagcgtagttttgttggcagctcccgtcttgccaaaaaccagtaccccgttgatgggaaagaactggtcctcatcatccttgttggttgccatgggaatgccaggattggtcaaagagtttctgccattcagatgatatttagtggcagcagtccaggcaaaattgctgttgttgttaaagtccaagttctttgacagtctctgttgcctatagcagggtccaggcagccagttctttgactgctcggccatagtattgggcccagcttgatgaaattgcagttccctggtggaacccgtggtgctctgggtccgggccaggtagtacaggtactggtcgatgagagggttcatcagccggtctaggctctggctgtgcgcgtagctgctgtggaaaggcacgtcctcgaagctgtaactgaactcaaagttgttgcccgttctcagcatttgagaggggaaatattccaggcagtagaaggaggaacggcccaccgattggctgccgttgttcagagtcaggtagccgtactgaggaatcatgaagacgtccgccgggaacggaggcaggcagccctggtgcgcagagccgaggacgtacggcagctggtattccgagtccgagaagacctgaaccgtgctggtaaggttattagcgatggtcgtgacgccgtcattcgttgtgacctccttgacctggatgttgaagagcttgaaccgcagcttcttgggccggaatccccagttgttgttgatgagtcgctgccagtcacgtggtgagaagtggcagtggaatctgttaaagtcaaaatacccccagggggtgctgtagccgaagtagtggttgtcattggtggctcctgagctgctgctggagatttgcttgtagaggtggttgttgtaggtggggagggcccaggttctggtgctggtggtgatgactctgtcgcccagccatgtggaatcgcaatgccaatttcctgaggcattacccactccgtcggcaccttcgttattgtctgccgttggtgcgccaccgcctgcagccattgtaccagatcccacactagagggcgctgctggaggttctccaagaggttgagggtcggggactgactctgagtcgccagtctgaccaaaattgagcttctttttagcgggctgctggccttttttgccgatgcccgtggaggagtctggagagtctatgggtctcttctttccaggagccgtcttagcgccttcctcaaccagaccgagaggttcgagaacccgcttcttggcctggaagactgctcgcccgaggttgcccccaaatgacgtatcttcttgcaggcgctcctgaaactcggcgtcggcgtggttataccgcaggtacggattgtcacccgctttgagctgctggtcgtaggccttgtcgtgctcgagggccgctgcgtccgccgcgttgacgggctcccccttgtcgagtccgttgaagggtccgaggtacttgtagccaggaagcaccagaccccggccgtcgtcctgcttttgctggttggctttgggtttcggggctccaggtttcaggtcccaccactcgcgaatgccctcagagaggttgtcctcgagccaatctggaagataaccatcggcagccatacctggtttaagccatttattgctcagaaacacagtcgtccaggtccacgttgaccaggtcgcaggccgagcaggcaatctcgggtgcccgccccagcagatgatgaatcgcacacagcttccgatacgtcttttttctgacgaccggttgagattctgacacgccggggaaacattctaaacagtctctgaccccgtgcgtgaagcaaatgttgaaattctgattcattctctcgcacgttttgcagggaaacagcatctgaagcatgcccgcgtggcgagaacatttgttttggtacctgtcggcaaagtccaccggagctccttccgcgtctgacgtcgatgggtccgtgactgagggacaggcccgcttgggctcgcttatatccgcgtcatcgggggcgggtcttttgctggctccgccctttctgacgtagaactcatgcgtcacctcagtcacgtgatcactagcccagcggaagaactctttgacttcctgctttgtcaccttgccaaagtcgtgttccagacggcgggtgagttcaaatttgaacatccggtcctgcaacggctgctggtgctcgaaggtggtgctgttcccgtcgatcacggcgcgcatgttggtgttggaggtgacgatcacgggggtgggatcgatctgggcggacgacttgcacttttggtccacgcgcaccttgctgccgccgagaatggccttggcggactccacgaccttggccgtcatcttgccctcctcccaccagatcaccatcttgtcgacgcaatcgttgaagggaaagttctcattggtccagttgacgcagcaagggcgaattc

SEQ ID NO: 443 - protein, 729 aa, Artificial Sequence; identical to SEQ ID NO: 171
  source: /note="Description of Artificial Sequence: Synthetic polypeptide"

SEQ ID NO: 444 - protein, 729 aa, Artificial Sequence
  source: /note="Description of Artificial Sequence: Synthetic polypeptide"
MAADGYLPDWLEDNLSEGIREWWDLKPGAPKPKANQQKQDDGRGLVLPGYKYLGPFNGLDKGEPVNAADAAALEHDKAYDQQLKAGDNPYLRYNHADAEFQERLQEDTSFGGNLGRAVFQAKKRVLEPLGLVEEGAKTAPGKKRPIDSPDSSTGIGKKGQQPAKKKLNFGQTGDSESVPDPQPLGEPPAAPSSVGSGTMAAGGGAPTADNNEGADGVGNASGNWHCDSTWLGDRVITTSTRTWALPTYNNHLYKQISSSSSGATNDNHYFGYSTPWGYFDFNRFHCHFSPRDWQRLINNNWGFRPKKLRFKLFNIQVKEVTTNDGVTTIANNLTSTVQVFSDSEYQLPYVLGSAHQGCLPPFPADVFMIPQYGYLTLNNGSQSVGRSSFYCLEYFPSQMLRTGNNFEFSYSFEDVPFHSSYAHSQSLDRLMNPLIDQYLYYLARTQSTTGSTRELQFHQAGPNTMAEQSKNWLPGPCYRQQRLSKNLDFNNNSNFAWTAATKYHLNGRNSLTNPGIPMATNKDDEDQFFPINGVLVFGKTGAANKTTLENVLMTSEEEIKTTNPVATEEYGVVSSNLQSSTAGPQSQTINSQGALPGMVWQNRDVYLQGPIWAKIPHTDGNFHPSPLMGGFGLKHPPPQILIKNTPVPANPPEVFTPAKFASFITQYSTGQVSVEIEWELQKENSKRWNPEIQYTSNYAKSNNVEFAVNPDGVYTEPRPIGTRYLTRNL

SEQ ID NO: 445 - protein, 729 aa, Artificial Sequence
  source: /note="Description of Artificial Sequence: Synthetic polypeptide"
MAADGYLPDWLEDNLSEGIREWWDLKPGAPKPKANQQKQDDGRGLVLPGYKYLGPFNGLDKGEPVNAADAAALEHDKAYDQQLKAGDNPYLRYNHADAEFQERLQEDTSFGGNLGRAVFQAKKRVLEPLGLVEEGAKTAPGKKRPIDSPDSSTGIGKKGQQPAKKKLNFGQTGDSESVPDPQPLGEPPAAPSSVGSGTMAAGGGAPMADNNEGADGVGNASGNWHCDSTWLGDRVITTSTRTWALPTYNNHLYKQISSSSSGATNDNHYFGYSTPWGYFDFNRFHCHFSPRDWQRLINNNWGFRPKKLRFKLFNIQVKEVTTNDGVTTIANNLTSTVQVFSDSEYQLPYVLGSAHQGCLPPFPADVFMIPQYGYLTLNNGSQSVGRSSFYCLEYFPSQMLRTGNNFEFSYSFEDVPFHSSYAHSQSLDRLMNPLIDQYLYYLARTQSTTGSTRELQFHQAGPNTMAEQSKNWLPGPCYRQQRLSKNLDFNNNSNFAWTAATKYHLNGRNSLTNPGIPMATNKDDEDQFFPINGVLVFGKTGAANKTTLENVLMTSEEEIKTTNPVATEEYGVVSSNLQSSTAGPQSQTINSQGALPGMVWQNRDVYLQGPIWAKIPHTDGNFHPSPLMGGFGLKHPPPQILIKNTPVPANPPEVFTPAKFASFITQYSTGQVSVEIEWELQKENSKRWNPEIQYTSNYAKSNNVEFAVNPDGVYTEPRPIGTRYLTRNL

SEQ ID NO: 446 - DNA, 2217 bp, Artificial Sequence
  source: /note="Description of Artificial Sequence: Synthetic polynucleotide"
atggctgctgacggttatcttccagattggctcgaggacaacctctctgagggcattcgcgagtggtgggacctgaaacctggagcccccaagcccaaggccaaccagcagaagcaggacgacggccggggtctggtgcttcctggctacaagtacctcggacccttcaacggactcgacaagggggagcccgtcaacgcggcggacgcagcggccctcgagcacgacaaggcctacgaccagcagctcaaagcgggtgacaatccgtacctgcggtataaccacgccgacgccgagtttcaggagcgtctacaagaagatacgtcttttgggggcaacctcgggcgagcagtcttccaggccaagaagcgggttctcgaacctctcggtctggttgaggaagctgctaagacggctcctggaaagaagagaccggtagaaccgtcacctcagcgttcccccgactcctccacgggcatcggcaagaaaggccagcggcccgctaaaaagagactgaactttggtcagactggcgactcagagtcagtccccgaccctcaaccaatcggagaaccaccagcaggcccctctggtctgggatctggtacaatggctgcaggcggtggcgctccaatggcagacaataacgaaggcgccgacggagtgggtagttcctcaggaaattggcattgcgattccacatggctgggcgacagagtcatcaccaccagcacccgaacctgggccctgcccacctacaacaaccacctctacaagcaaatatccaatgggacatcgggaggaagcaccaacgacaacacctacttcggctacagcaccccctgggggtattttgacttcaacagattccactgccacttctcaccacgtgactggcagcgactcatcaacaacaactggggattccggccaaaaagactcagcttcaagcccttcaacatccaggtcaaggaggtcacgcagaatgaaggcaccaagaccatcgccaataaccttaccagcacgattcaggtatttacggactcggaataccagctgccgtacgtcctcggctccgcgcaccagggctgcctgcctccgttcccggcggacgtcttcatgattccccagtacggctaccttacactgaacaatggaagtcaagccgtaggccgttcctccttctactgcctggaatattttccatctcaaatgctgcgaactggaaacaattttgaattcagctacaccttcgaggacgtgcctttccacagcagctacgcacacagccagagcttggaccgactgatgaatcctctcatcgaccagtacctgcactacttatccagaactcagtccacaggaggaactcaaggtacccagcaattgttattttctcaagctgggcctgcaaacatgtcggctcaggctaagaactggctacctggaccttgctaccggcagcagcgagtctctacgacactgtcgcaaaacaacaacagcaactttgcttggactggtgccaccaaatatcacctgaacggaagagactctttggtaaatcccggtgtcgccatggcaacccacaaggacgacgaggaacgcttcttcccgtcgagtggagtcctgatgtttggaaaacagggtgctggaagagacaatgtggactacagcagcgttatgctaaccagcgaagaagaaattaaaaccactaaccctgtagccacagaacaatacggtgtggtggctgacaacttgcagcaaaccaatacagggcctattgtgggaaatgtcaacagccaaggagccttacctggcatggtctggcagaaccgagacgtgtacctgcagggtcccatctgggccaagattcctcacacggacggcaacttccacccttcaccgctaatgggaggatttggactgaagcacccacctcctcagatcctgatcaagaacacgccggtacctgcggatcctccaacaacgttcagccaggcgaaattggcttccttcattacgcagtacagcaccggacaggtcagcgtggaaatcgagtgggagctgcagaaggagaacagcaaacgctggaacccagagattcagtacacttcaaactactacaaatctacaaatgtggactttgctgtcaatacagagggaacttattctgagcctcgccccattggtactcgctacctcacccgtaatctgtaa

SEQ ID NO: 447 - protein, 738 aa, Artificial Sequence
  source: /note="Description of Artificial Sequence: Synthetic polypeptide"
MAADGYLPDWLEDNLSEGIREWWDLKPGAPKPKANQQKQDDGRGLVLPGYKYLGPFNGLDKGEPVNAADAAALEHDKAYDQQLKAGDNPYLRYNHADAEFQERLQEDTSFGGNLGRAVFQAKKRVLEPLGLVEEAAKTAPGKKRPVEPSPQRSPDSSTGIGKKGQRPAKKRLNFGQTGDSESVPDPQPIGEPPAGPSGLGSGTMAAGGGAPMADNNEGADGVGSSSGNWHCDSTWLGDRVITTSTRTWALPTYNNHLYKQISNGTSGGSTNDNTYFGYSTPWGYFDFNRFHCHFSPRDWQRLINNNWGFRPKRLSFKPFNIQVKEVTQNEGTKTIANNLTSTIQVFTDSEYQLPYVLGSAHQGCLPPFPADVFMIPQYGYLTLNNGSQAVGRSSFYCLEYFPSQMLRTGNNFEFSYTFEDVPFHSSYAHSQSLDRLMNPLIDQYLHYLSRTQSTGGTQGTQQLLFSQAGPANMSAQAKNWLPGPCYRQQRVSTTLSQNNNSNFAWTGATKYHLNGRDSLVNPGVAMATHKDDEERFFPSSGVLMFGKQGAGRDNVDYSSVMLTSEEEIKTTNPVATEQYGVVADNLQQTNTGPIVGNVNSQGALPGMVWQNRDVYLQGPIWAKIPHTDGNFHPSPLMGGFGLKHPPPQILIKNTPVPADPPTTFSQAKLASFITQYSTGQVSVEIEWELQKENSKRWNPEIQYTSNYYKSTNVDFAVNTEGTYSEPRPIGTRYLTRNL

SEQ ID NO: 448 - DNA, 2217 bp, Artificial Sequence
  source: /note="Description of Artificial Sequence: Synthetic polynucleotide"
atggctgctgacggttatcttccagattggctcgaggacaacctctctgagggcattcgcgagtggtgggacctgaaacctggagcccccaagcccaaggccaaccagcagaagcaggacgacggccggggtctggtgcttcctggctacaagtacctcggacccttcaacggactcgacaagggggagcccgtcaacgcggcggacgcagcggccctcgagcacgacaaggcctacgaccagcagctcaaagcgggtgacaatccgtacctgcggtataaccacgccgacgccgagtttcaggagcgtctgcaagaagatacgtcttttgggggcaacctcgggcgagcagtcttccaggccaagaagcgggttctcgaacctctcggtctggttgaggaagctgctaagacggctcctggaaagaagagaccggtagaaccgtcacctcagcgttcccccgactcctccacgggcatcggcaagaaaggccagcagcccgctaaaaagagactgaactttggtcagactggcgactcagagtcagtccccgaccctcaaccaatcggagaaccaccagcaggcccctctggtctgggatctggtacaatggctgcaggcggtggcgctccaatggcagacaataacgaaggcgccgacggagtgggtagttcctcaggaaattggcattgcgattccacatggctgggcgacagagtcatcaccaccagcacccgaacctgggccctgcccacctacaacaaccacctctacaagcaaatatccaatgggacatcgggaggaagcaccaacgacaacacctacttcggctacagcaccccctgggggtattttgacttcaacagattccactgccacttctcaccacgtgactggcagcgactcatcaacaacaactggggattccggccaaaaagactcagcttcaagctcttcaacatccaggtcaaggaggtcacgcagaatgaaggcaccaagaccatcgccaataaccttaccagcacgattcaggtatttacggactcggaataccagctgccgtacgtcctcggctccgcgcaccagggctgcctgcctccgttcccggcggacgtcttcatgattccccagtacggctaccttacactgaacaatggaagtcaagccgtaggccgttcctccttctactgcctggaatattttccatctcaaatgctgcgaactggaaacaattttgaattcagctacaccttcgaggacgtgcctttccacagcagctacgcacacagccagagcttggaccgactgatgaatcctctcatcgaccagtacctgtactacttatccagaactcagtccacaggaggaactcaaggtacccagcaattgttattttctcaagctgggcctgcaaacatgtcggctcaggctaagaactggctacctggaccttgctaccggcagcagcgagtctctacgacactgtcgcaaaacaacaacagcaactttgcttggactggtgccaccaaatatcacctgaacggaagagactctttggtaaatcccggtgtcgccatggcaacccacaaggacgacgaggaacgcttcttcccgtcgagtggagtcctgatgtttggaaaacagggtgctggaagagacaatgtggactacagcagcgttatgctaaccagcgaagaagaaattaaaaccactaaccctgtagccacagaacaatacggtgtggtggctgataacttgcagcaaaccaatacggggcctattgtgggaaatgtcaacagccaaggagccttacctggcatggtctggcagaaccgagacgtgtacctgcagggtcccatctgggccaagattcctcacacggacggcaacttccacccttcaccgctaatgggaggatttggactgaagcacccacctcctcagatcctgatcaagaacacgccggtacctgcggatcctccaacaacgttcagccaggcgaaattggcttccttcattacgcagtacagcaccggacaggtcagcgtggaaatcgagtgggagctgcagaaggagaacagcaaacgctggaacccagagattcagtacacttcaaactactacaaatctacaaatgtggactttgctgtcaatacagagggaacttattctgagcctcgccccattggtactcgttacctcacccgtaatctgtaa

SEQ ID NO: 449 - protein, 738 aa, Artificial Sequence; identical to SEQ ID NO: 101
  source: /note="Description of Artificial Sequence: Synthetic polypeptide"

SEQ ID NO: 450 - protein, 738 aa, Artificial Sequence
  source: /note="Description of Artificial Sequence: Synthetic polypeptide"
MAADGYLPDWLEDNLSEGIREWWDLKPGAPKPKANQQKQDDGRGLVLPGYKYLGPFNGLDKGEPVNAADAAALEHDKAYDQQLKAGDNPYLRYNHADAEFQERLQEDTSFGGNLGRAVFQAKKRVLEPLGLVEEAAKTAPGKKRPVEPSPQRSPDSSTGIGKKGQQPAKKRLNFGQTGDSESVPDPQPIGEPPAGPSGLGSGTMAAGGGAPMADNNEGADGVGSSSGNWHCDSTWLGDRVITTSTRTWALPTYNNHLYKQISNGTSGGSTNDNTYFGYSTPWGYFDFNRFHCHFSPRDWQRLINNNWGFRPKRLSFKLFNIQVKEVTQDEGTKTIANNLTSTIQVFTDSEYQLPYVLGSAHQGCLPPFPADVFMIPQYGYLTLNNGSQAVGRSSFYCLEYFPSQMLRTGNNFEFSYTFEDVPFHSSYAHSQSLDRLMNPLIDQYLYYLSRTQSTGGTQGTQQLLFSQAGPANMSARAKNWLPGPCYRQQRVSTTLSQNNNSNFAWTGATKYHLNGRDSLVNPGVAMATHKDDEERFFPSSGVLMFGKQGAGRDNVDYSSVMLTSEEEIKTTNPVATEQYGVVADNLQQANTGPIVGNVNSQGALPGMVWQNRDVYLQGPIWAKIPHTDGNFHPSPLMGGFGLKHPPPQILIKNTPVPADPPTTFSQAKLASFITQYSTGQVSVEIEWELQKENSKRWNPEIQYTSNYYKSTNVDFAVNSEGTYSEPRPIGTRYLTRNL

SEQ ID NO: 451 - DNA, 2217 bp, Artificial Sequence
  source: /note="Description of Artificial Sequence: Synthetic polynucleotide"
atggctgctgacggttatcttccagattggctcgaggacaacctctctgagggcattcgcgagtggtgggacctgaaacctggagcccccaagcccaaggccaaccagcagaagcaggacgacggccggggtctggtgcttcctggctacaagtacctcggacccttcaacggactcgacaagggggagcccgtcaacgcggcggacgcagcggccctcgagcacgacaaggcctacgaccagcagctcaaagcgggtgacaatccgtacctgcggtataaccacgccgacgccgagtttcaggagcgtctgcaagaagatacgtcttttgggggcaacctcgggcgagcagtcttccaggccaagaagcgggttctcgaacctctcggtctggttgaggaagctgctaagacggctcctggaaagaagagaccggtagaaccgtcacctcagcgttcccccgactcctccacgggcatcggcaagaaaggccagcagcccgctaaaaagagactgaactttggtcagactggcgactcagagtcagtccccgaccctcaaccaatcggagaaccaccagcaggcccctctggtctgggatctggtacaatggctgcaggcggtggcgctccaatggcagacaataacgaaggcgccgacggagtgggtagttcctcaggaaattggcattgcgattccacatggctgggcgacagagtcatcaccaccagcacccgaacctgggccctgcccacctacaacaaccacctctacaagcaaatatccaatgggacatcgggaggaagcaccaacgacaacacctacttcggctacagcaccccctgggggtattttgacttcaacagattccactgccacttctcaccacgtgactggcagcgactcatcaacaacaactggggattccggccaaaaagactcagcttcaagctcttcaacatccaggtcaaggaggtcacgcaggatgaaggcaccaagaccatcgccaataaccttaccagcacgattcaggtatttacggactcggaataccagctgccgtacgtcctcggctccgcgcaccagggctgcctgcctccgttcccggcggacgtcttcatgattccccagtacggctaccttacactgaacaatggaagtcaagccgtaggccgttcctccttctactgcctggaatattttccatctcaaatgctgcgaactggaaacaattttgaattcagctacaccttcgaggacgtgcctttccacagcagctacgcacacagccagagcttggaccgactgatgaatcctctcatcgaccagtacctgtactacttatccagaactcagtccacaggaggaactcaaggtacccagcaattgttattttctcaagctgggcctgcaaacatgtcggctcgggctaagaactggctacctggaccttgctaccggcagcagcgagtctctacgacactgtcgcaaaacaacaacagcaactttgcttggactggtgccaccaaatatcacctgaacggaagagactctttggtaaatcccggtgttgctatggcaacgcataaggacgacgaggaacgtttctttccatcgagcggagtcctgatgtttggaaaacagggtgctggaagagacaatgtggactatagcagcgttatgctaaccagcgaggaagaaattaaaaccactaaccctgtagccacagaacaatacggtgtggtggctgacaacttgcagcaagccaatacagggcctattgtgggaaatgtcaacagccaaggagccttacctggcatggtctggcagaaccgagacgtgtacctgcagggtcccatctgggccaaaattcctcacacggacggcaattttcacccgtctcctctgatgggcggctttggactgaagcacccacctccccagatcctgatcaagaatacgccggtacctgcggatcctccaacgacgttcagccaggcaaaattggcttccttcatcacgcagtacagcaccggccaggtcagcgtggagatcgagtgggagctgcagaaggagaacagcaagcgatggaacccagaaattcagtacacttccaactactacaaatctacaaatgtggactttgctgtcaattctgagggtacatattcagagcctcgccccattggtactcgttatctgacacgtaatctgtaa

SEQ ID NO: 452 - DNA, 2211 bp, Artificial Sequence
  source: /note="Description of Artificial Sequence: Synthetic polynucleotide"
atggctgccgatggttatcttccagattggctcgaggacaacctctctgagggcattcgcgagtggtgggacttgaaacctggagccccgaaacccaaagccaaccagcaaaagcaggacgacggccggggcctggtgcttcctggctacaagtacctcggacccttcaacggactcgacaagggggagcccgtcaacgcggcggacgcagcggccctcgagcacgacaaggcctacgaccagcagctcgaagcgggtgacaatccgtacctgcggtataaccacgccgacgccgagtttcaggagcgtctgcaagaagatacgtcttttgggggcaacctcgggcgagcagtcttccaggccaagaagcgggttctcgaacctctcggtctggttgaggaaggcgctaagacggctcctggaaagaagagaccagtagagcagtcaccccaagaaccagactcctcctcgggcatcggcaagaaaggccaacagcccgccagaaaaagactcaattttggccagactggcgactcagagtcagttccagaccctcaacctctcggagaacctccagcagcgccctctggtgtgggacctaatacaatggctgcaggcggtggcgcaccaatggcagacaataacgaaggcgccgacggagtgggtagttcctcgggaaattggcattgcgattccacatggctgggcgacagagtcatcaccaccagcacccgaacctgggccctgcccacctacaacaaccacctctacaagcaaatctccaacgggacatcgggaggagccaccaacgacaacacctacttcggctacagcaccccctgggggtattttgactttaacagattccactgccacttttcaccacgtgactggcagcgactcatcaacaacaactggggattccggcccaagagactcagcttcaagctcttcaacatccaggtcaaggaggtcacgcagaatgaaggcaccaagaccatcgccaataacctcaccagcaccatccaggtgtttacggactcggagtaccagctgccgtacgttctcggctctgcccaccagggctgcctgcctccgttcccggcggacgtgttcatgattccccagtacggctacctaacactcaacaacggtagtcaggccgtgggacgctcctccttctactgcctggaatactttccttcgcagatgctgagaaccggcaacaacttccagtttacttacaccttcgaggacgtgcctttccacagcagctacgcccacagccagagcttggaccggctgatgaatcctctgattgaccagtacctgtactacttgtctcggactcaaacaacaggaggcacggcaaatacgcagactctgggcttcagccaaggtgggcctaatacaatggccaatcaggcaaagaactggctgccaggaccctgttaccgccaacaacgcgtctcaacgacaaccgggcaaaacaacaatagcaactttgcctggactgctgggaccaaataccatctgaatggaagaaattcattggctaatcctggcatcgctatggcaacacacaaagacgacgaggagcgttttttcccagtaacgggatcctgtttttggcaacaaaatgctgccagagacaatgcggattacagcgatgtcatgctcaccagcgaggaagaaatcaaaaccactaaccctgtggctacagaggaatacggtatcgtggcagataacttgcagcagcaaaacacggctcctcaaattggaactgtcaacagccagggggccttacccggtatggtctggcagaaccgggacgtgtacctgcagggtcccatctgggccaagattcctcacacggacggcaacttccacccgtctccgctgatgggcggctttggcctgaaacatcctccgcctcagatcctgatcaagaacacgcctgtacctgcggatcctccgaccaccttcaaccagtcaaagctgaactctttcatcacgcaatacagcaccggacaggtcagcgtggaaattgaatgggagctacagaaggaaaacagcaagcgctggaaccccgagatccagtacacctccaactactacaaatctacaagtgtggactttgctgttaatacagaaggcgtgtactctgaaccccgccccattggcacccgttacctcacccgtaatctgtaa

SEQ ID NO: 453 - protein, 736 aa, Artificial Sequence
  source: /note="Description of Artificial Sequence: Synthetic polypeptide"
MAADGYLPDWLEDNLSEGIREWWDLKPGAPKPKANQQKQDDGRGLVLPGYKYLGPFNGLDKGEPVNAADAAALEHDKAYDQQLEAGDNPYLRYNHADAEFQERLQEDTSFGGNLGRAVFQAKKRVLEPLGLVEEGAKTAPGKKRPVEQSPQEPDSSSGIGKKGQQPARKRLNFGQTGDSESVPDPQPLGEPPAAPSGVGPNTMAAGGGAPMADNNEGADGVGSSSGNWHCDSTWLGDRVITTSTRTWALPTYNNHLYKQISNGTSGGATNDNTYFGYSTPWGYFDFNRFHCHFSPRDWQRLINNNWGFRPKRLSFKLFNIQVKEVTQNEGTKTIANNLTSTIQVFTDSEYQLPYVLGSAHQGCLPPFPADVFMIPQYGYLTLNNGSQAVGRSSFYCLEYFPSQMLRTGNNFQFTYTFEDVPFHSSYAHSQSLDRLMNPLIDQYLYYLSRTQTTGGTANTQTLGFSQGGPNTMANQAKNWLPGPCYRQQRVSTTTGQNNNSNFAWTAGTKYHLNGRNSLANPGIAMATHKDDEERFFPVTGSCFWQQNAARDNADYSDVMLTSEEEIKTTNPVATEEYGIVADNLQQQNTAPQIGTVNSQGALPGMVWQNRDVYLQGPIWAKIPHTDGNFHPSPLMGGFGLKHPPPQILIKNTPVPADPPTTFNQSKLNSFITQYSTGQVSVEIEWELQKENSKRWNPEIQYTSNYYKSTSVDFAVNTEGVYSEPRPIGTRYLTRNL

SEQ ID NO: 454 - DNA, 2214 bp, Artificial Sequence
  source: /note="Description of Artificial Sequence: Synthetic polynucleotide"
atggctgctgacggttatcttccagattggctcgaggacaacctctctgagggcattcgcgagtggtgggacctgaaacctggagcccccaagcccaaggccaaccagcagaagcaggacgacggccggggtctggtgcttcctggctacaagtacctcggacccttcaacggactcgacaagggggagcccgtcagcgcggcggacgcagcggccctcgagcacgacaaggcctgcgaccagcggctcaaagcgggtgacaatccgtacctgcggtataaccacgccgacgccgagtttcaggagcgtctgcaagaagatacgtcttttgggggcaacctcgggcgagcagtcttccaggccaagaagcgggttctcgaacctctcggtctggttgaggaagctgctaagacggctcctggaaagaagggaccggtagaaccgtcacctcagcgttcccccgactcctccacgggcatcggcaagaaaggccagcagcccgctagaaagagactgaactttgggcagactggcgactcagagtcagtccccgaccctcaaccaatcggagaaccaccagcaggcccctctggtctgggatctggtacaatggctgcaggcggtggcgcaccaatggctgacaataacgagggcgccgacggagtgggtaatgcctcaggaaattggcattgcgattccacatggctgggcgacagagtcatcaccaccagcacccgaacctgggctttgcccacctacaacaatcacctctacaagcaaatctccagtcagtcagcaggtagcaccaacgacaacgtctacttcggctacagcaccccctgggggtattttgacttcaacagattccactgtcacttctcaccacgtgactggcagcggctcatcaacaacaactggggattccggcccaagaagctcaacttcaagctgttcaacatccaggtcaaggaggtcacaacgaatgacggcgtcacgaccatcgccaataaccttaccagcacggttcaggtcttttcggactcggaataccagctgccctacgtcctcggctccgcacaccagggctgcctgcctccgttcccggcggacgtcttcatgattccccagtacggctacctgactctgaacaatggcagccaatcggtgggtcgttcctctttctactgcctggaatatttcccttctcaaatgctgagaacgggcaacaacttcaccttcagctacaccttcgaggacgttcccttccacagcagctacgcacacagccagagcctggaccggctgatgaatcctcttatcgaccagtacctgtattacctggccagaacacagagcaacgcaggaggcacagctggcaatcgggaactgcagttttatcagggcgggcctaccaccatggccgaacaagccaaaaactggctgcctggaccttgcttccggcaacaaagagtctccaagacgctggatcaaaacaacaacagcaactttgcttggactggtgccaccaaataccatctaaatggaagaaattcattggttaatcccggtgtcgccatggcaacccacaaggacgacgaggaacgcttcttcccttcgagcggagtcctgatttttggaaaaactggagcagctaataagactacactggaaaatgtgttaatgacaaatgaagaggaaattcgtcctaccaacccggtagccaccgaggaatacgggactgttagcagcaacctgcaggcggctaacactgcagcccagacacaagttgtcaacaaccagggagccttacctggtatggtctggcagaaccgggacgtgtacctgcagggtcccatctgggccaagattcctcacacggacggcaactttcacccgtctccgctgatgggcggctttggactgaagcatccgcctcctcagatcctgatcaaaaacactcctgttcctgctaatcccccggaggtgtttacgcctgccaagtttgcttctttcatcacacagtacagcaccggccaggtcagcgtggagatcgagtgggagctgcagaaggagaacagcaagcgctggaacccagagattcagtatacctccaattttgacgaacagactggtgtggactttgccgttgacagccagggtgtttattctgagcctcgccccattggtactcgttacctcacccgtaatctgtaa

SEQ ID NO: 455 - protein, 737 aa, Artificial Sequence
  source: /note="Description of Artificial Sequence: Synthetic polypeptide"
MAADGYLPDWLEDNLSEGIREWWDLKPGAPKPKANQQKQDDGRGLVLPGYKYLGPFNGLDKGEPVSAADAAALEHDKACDQRLKAGDNPYLRYNHADAEFQERLQEDTSFGGNLGRAVFQAKKRVLEPLGLVEEAAKTAPGKKGPVEPSPQRSPDSSTGIGKKGQQPARKRLNFGQTGDSESVPDPQPIGEPPAGPSGLGSGTMAAGGGAPMADNNEGADGVGNASGNWHCDSTWLGDRVITTSTRTWALPTYNNHLYKQISSQSAGSTNDNVYFGYSTPWGYFDFNRFHCHFSPRDWQRLINNNWGFRPKKLNFKLFNIQVKEVTTNDGVTTIANNLTSTVQVFSDSEYQLPYVLGSAHQGCLPPFPADVFMIPQYGYLTLNNGSQSVGRSSFYCLEYFPSQMLRTGNNFTFSYTFEDVPFHSSYAHSQSLDRLMNPLIDQYLYYLARTQSNAGGTAGNRELQFYQGGPTTMAEQAKNWLPGPCFRQQRVSKTLDQNNNSNFAWTGATKYHLNGRNSLVNPGVAMATHKDDEERFFPSSGVLIFGKTGAANKTTLENVLMTNEEEIRPTNPVATEEYGTVSSNLQAANTAAQTQVVNNQGALPGMVWQNRDVYLQGPIWAKIPHTDGNFHPSPLMGGFGLKHPPPQILIKNTPVPANPPEVFTPAKFASFITQYSTGQVSVEIEWELQKENSKRWNPEIQYTSNFDEQTGVDFAVDSQGVYSEPRPIGTRYLTRNL

SEQ ID NO: 456 - DNA, 2214 bp, Artificial Sequence
  source: /note="Description of Artificial Sequence: Synthetic polynucleotide"
atggctgccgatggttatcttccagattggctcgaggacaacctctctgagggcattcgcgagtggtgggacctgaaacctggagccccgaaacccaaagccaaccagcaaaagcaggacgacggccggggtctggtgcttcctggctacaagtacctcggacccttcaacggactcgacaagggggagcccgtcaacgcggcggacgcagcggccctcgagcacgacaaggcctacgaccagcagctcaaagcgggtgacaatccgtacctgcggtataaccacgccgacgccgagtttcaggagcgtctgcaagaagatacgtcttttgggggcaacctcgggcgagcagtcttccaggccaagaagcgggttctcgaacctctcggtctggttgaggaagctgctaagacggctcctggaaagaagagaccggtagaaccgtcacctcagcgttcccccgactcctccacgggcatcggcaagaaaggccagcagcccgctagaaagagactgaactttgggcagactggcgactcagagtcagtccccgaccctcaaccaatcggagaaccaccagcaggcccctctggtctgggatctggtacaatggctgcaggcggtggcgctccaatggcagacaataacgaaggcgccgacggagtgggtaatgcctcaggaaattggcattgcgattccacatggctgggcgacagagtcatcaccaccagcacccgaacctgggctttgcccacctacaacaaccacctctacaagcaaatctccagtcagtcagcaggtagcaccaacgacaacgtctacttcggctacagcaccccctgggggtattttgacttcaacagattccactgtcacttctcaccacgtgactggcagcggctcatcaacaacaactggggattccggcccaagaagctcaacttcaagctgttcaacatccaggtcaaggaggtcacaacgaatgacggcgtcacgaccatcgccaataaccttaccagcacggttcaggtcttttcggactcggaataccagctgccctacgtcctcggctccgcacaccagggctgcctgcctccgttcccggcggacgtcttcatgattcctcagtacggctacctgactctcaacaacggtagtcaggccgtgggacgttcctccttctactgcctggagtacttcccctctcagatgctgagaacgggcaacaacttttccttcagctacactttcgaggacgtgcctttccacagcagctacgcgcacagccagagtttggacaggctgatgaatcctctcatcgaccagtacctgtactacctgtcaagaacccagtctacgggaggcacagcgggaacccagcagttgctgttttctcaggccgggcctagcaacatgtcgactcaggccagaaactggctgcctggaccctgctacagacagcagcgcgtctccacgacactgtcgcaaaacaacaacagcaactttgcctggactggtgccaccaagtatcatctgaacggcagagactctctggtgaatccgggcgtcgccatggcaaccaacaaggacgacgaggaccgcttcttcccatccagcggcatcctcatgtttggcaagcagggagctggaaaagacaacgtggactatagcaacgtgatgctaaccagcgaggaagaaatcaagaccaccaaccccgtggccacagaacagtatggcgtggtggctgataacctacagcagcaaaacaccgctcctattgtgggggccgtcaacagccagggagccttacctggcatggtctggcagaaccgggacgtgtacctgcagggtcctatttgggccaagattcctcacacagatggcaactttcacccgtctcctttaatgggcggctttggacttaaacatccgcctcctcagatccttatcaaaaacactcctgttcctgcggatcctccaacagcgttcaaccaggccaagctgaattctttcatcacgcagtacagcaccggacaagtcagcgtggagatcgagtgggagctgcagaaggagaacagcaagcgctggaacccagagattcagtatacttccaactactacaaatctacaaatgtggactttgctgttaatactgagggtgcttactctgagcctcgccccattggcactcgttacctcacccgtaatctgtaa

SEQ ID NO: 457 - protein, 737 aa, Artificial Sequence
  source: /note="Description of Artificial Sequence: Synthetic polypeptide"
MAADGYLPDWLEDNLSEGIREWWDLKPGAPKPKANQQKQDDGRGLVLPGYKYLGPFNGLDKGEPVNAADAAALEHDKAYDQQLKAGDNPYLRYNHADAEFQERLQEDTSFGGNLGRAVFQAKKRVLEPLGLVEEAAKTAPGKKRPVEPSPQRSPDSSTGIGKKGQQPARKRLNFGQTGDSESVPDPQPIGEPPAGPSGLGSGTMAAGGGAPMADNNEGADGVGNASGNWHCDSTWLGDRVITTSTRTWALPTYNNHLYKQISSQSAGSTNDNVYFGYSTPWGYFDFNRFHCHFSPRDWQRLINNNWGFRPKKLNFKLFNIQVKEVTTNDGVTTIANNLTSTVQVFSDSEYQLPYVLGSAHQGCLPPFPADVFMIPQYGYLTLNNGSQAVGRSSFYCLEYFPSQMLRTGNNFSFSYTFEDVPFHSSYAHSQSLDRLMNPLIDQYLYYLSRTQSTGGTAGTQQLLFSQAGPSNMSTQARNWLPGPCYRQQRVSTTLSQNNNSNFAWTGATKYHLNGRDSLVNPGVAMATNKDDEDRFFPSSGILMFGKQGAGKDNVDYSNVMLTSEEEIKTTNPVATEQYGVVADNLQQQNTAPIVGAVNSQGALPGMVWQNRDVYLQGPIWAKIPHTDGNFHPSPLMGGFGLKHPPPQILIKNTPVPADPPTAFNQAKLNSFITQYSTGQVSVEIEWELQKENSKRWNPEIQYTSNYYKSTNVDFAVNTEGAYSEPRPIGTRYLTRNL

SEQ ID NO: 458 - DNA, 2217 bp, Artificial Sequence
  source: /note="Description of Artificial Sequence: Synthetic polynucleotide"
atggctgccgatggttatcttccagattggctcgaggacaacctctctgagggcattcgcgagtggtgggacctgaaacctggagccccgaaacccaaagccaaccagcaaaagcaggacgacggccggggtctggtgcttcctggctacaagtacctcggacccttcaacggactcgacaagggggagcccgtcaacgcggcggacgcagcggccctcgagcacgacaaggcctacgaccagcagctcaaagcgggtgacaatccgtacctgcggtataatcacgccgacgccgagtttcaggagcgtctgcaagaagatacgtcttttgggggcaacctcgggcgagcagtcttccaggccaagaagcgggttctcgaacctctcggtctggttgaggaaggcgctaagacggctcctggaaagaagagaccggtagagccgtcaccacagcgttcccccgactcctccacgggcatcggcaagaaaggccagcagcccgccagaaagagactcaatttcggtcagactggcgactcagagtcagtccccgaccctcaacctatcggagaacctccagcagcgccctctagtgtgggatctggtacaatggctgcaggcggtggcgcaccaatggcagacaataacgaaggtgccgacggagtgggtagttcctcgggaaattggcattgcgattccacatggctgggcgacagagtcatcaccaccagcacccgaacctgggccctgcccacctacaacaaccacctctacaagcaaatctccaacgggacctcgggaggcagcaccaacgacaacacctactttggctacagcaccccctgggggtattttgactttaacagattccactgccacttctcaccacgtgactggcagcgactcatcaacaacaactggggattccggcccaagagactcagcttcaagctcttcaacatccaggtcaaagaggtcacgcagaatgaaggcaccaagaccatcgccaataacctcaccagcaccatccaggtgtttacggactcggaataccagctgccgtacgtcctcggctctgcccaccagggctgcctgcctccgttcccggcggacgtcttcatgattcctcagtacggctacctgactctcaacaacggtagtcaggccgtgggacgttcctccttctactgcctggagtacttcccctctcagatgctgagaacgggcaacaacttttccttcagctacactttcgaggacgtgcctttccacagcagctacgcgcacagccagagtttggacaggctgatgaatcctctcatcgaccagtacctgtactacctgtcaagaacccagtctacgggaggcacagcgggaacccagcagttgctgttttctcaggccgggcctagcaacatgtcggctcaggccagaaactggctgcctggaccctgctacagacagcagcgcgtctccacgacactgtcgcaaaacaacaacagcaactttgcctggactggtgccaccaagtatcatctgaacggcagagactctctggtgaatccgggcgtcgccatggcaaccaacaaggacgacgaggaccgcttcttcccatccagcggcatcctcatgtttggcaagcagggagctggaaaagacaacgtggactatagcaacgtgatgctaaccagcgaggaagaaatcaaggccaccaaccccgtggccacagaacagtatggcgtggtggctgataacctacagcagcaaaacaccgctcctattgtgggggccgtcaacagccagggagccttacctggcatggtctggcagaaccgggacgtgtacctgcagggtcctatttgggccaagattcctcacacagatggcaactttcacccgtctcctttaatgggcggctttggacttaaacatccgcctcctcagatcctcatcaaaaacactcctgttcctgcggatcctccaacagcgttcaaccaggccaagctgaattctttcatcacgcagtacagcaccggacaagtcagcgtggagatcgagtgggagctgcagaaggagaacagcaagcgctggaacccagagattcagtatacttccaactactacaaatctacaaatgtggactttgctgttaatactgagggtgtttactctgagcctcgccccattggcactcgttacctcacccgtaatctgtaa

SEQ ID NO: 459 - protein, 738 aa, Artificial Sequence
  source: /note="Description of Artificial Sequence: Synthetic polypeptide"
MAADGYLPDWLEDNLSEGIREWWDLKPGAPKPKANQQKQDDGRGLVLPGYKYLGPFNGLDKGEPVNAADAAALEHDKAYDQQLKAGDNPYLRYNHADAEFQERLQEDTSFGGNLGRAVFQAKKRVLEPLGLVEEGAKTAPGKKRPVEPSPQRSPDSSTGIGKKGQQPARKRLNFGQTGDSESVPDPQPIGEPPAAPSSVGSGTMAAGGGAPMADNNEGADGVGSSSGNWHCDSTWLGDRVITTSTRTWALPTYNNHLYKQISNGTSGGSTNDNTYFGYSTPWGYFDFNRFHCHFSPRDWQRLINNNWGFRPKRLSFKLFNIQVKEVTQNEGTKTIANNLTSTIQVFTDSEYQLPYVLGSAHQGCLPPFPADVFMIPQYGYLTLNNGSQAVGRSSFYCLEYFPSQMLRTGNNFSFSYTFEDVPFHSSYAHSQSLDRLMNPLIDQYLYYLSRTQSTGGTAGTQQLLFSQAGPSNMSAQARNWLPGPCYRQQRVSTTLSQNNNSNFAWTGATKYHLNGRDSLVNPGVAMATNKDDEDRFFPSSGILMFGKQGAGKDNVDYSNVMLTSEEEIKATNPVATEQYGVVADNLQQQNTAPIVGAVNSQGALPGMVWQNRDVYLQGPIWAKIPHTDGNFHPSPLMGGFGLKHPPPQILIKNTPVPADPPTAFNQAKLNSFITQYSTGQVSVEIEWELQKENSKRWNPEIQYTSNYYKSTNVDFAVNTEGVYSEPRPIGTRYLTRNL

SEQ ID NO: 460 - DNA, 2217 bp, Artificial Sequence
  source: /note="Description of Artificial Sequence: Synthetic polynucleotide"
atggctgccgatggttatcttccagattggctcgaggacaacctctctgagggcattcgcgagtggtgggacctgaaacctggagccccgaaacccaaagccaaccagcaaaagcaggacgacggccggggtctggtgcttcctggctacaagcacctcggacccttcaacggactcgacaagggggagcccgtcaacgcggcggacgcagcggccctcgagcacgacaaggcctacgaccagcagctcaaagcgggtgacaatccgtacctgcggtataatcacgctgacgccgagtttcaggagcgtctgcaagaagatacgtcttttgggggcaacctcgggcgagcagtcttccaggccaagaagcgggttctcgaacctctcggtctggttgaggaaggcgctaagacggctcctggaaagaagagaccggtagagccgtcaccacagcgttcccccgactcctccacgggcatcggcaagaaaggccagcagcccgccagaaagagactcaatttcggtcagactggcgactcagagtcagtccccgaccctcaacctatcggagaacctccagcagcgccctctagtgtgggatctggtacaatggctgcaggcggtggcgcaccaatggcagacaataacgaaggtgccgacggagtgggtagttcctcgggaaattggcattgcgattccacatggctgggcgacagagtcatcaccaccagcacccgaacctgggccctgcccacctacaacaaccacctctacaagcaaatctccaacgggacctcgggaggcagcaccaacgacaacacctactttggctacagcaccccctgggggtattttgactttaacagattccactgccacttctcaccacgtgactggcagcgactcatcaacaacaactggggattccggcccaagagactcagcttcaagctcttcaacatccaggtcaaagaggtcacgcagaatgaaggcaccaagaccatcgccaataaccttaccagcacggttcaggtcttttcggactcggaataccagctgccctacgtcctcggctccgcacaccagggctgcctgcctccgttcccggcggacgtcttcatgattccccagtacggctacctgactctgaacaatggcagccaatcggtgggtcgttcctctttctactgcctggaatatttcccttctcaaatgctgagaacgggcaacaacttcaccttcagctacaccttcgaggacgttcccttccacagcagctacgcacacagccagagcctggaccggctgatgaatcctcttatcgaccagtacctgtattacctggccagaacacagagcaacgcaggaggcacagctggcaatcgggaactgcagttttatcagggcgggcctaccaccatggccgaacaagccaaaaactggctgcctggaccttgcttccggcaacaaagagtctccaagacgctggatcaaaacaacaacagcaactttgcttggactggtgccaccaaataccatctaaatggaagaaattcattggttaatcccggtgtcgccatggcaacccacaaggacgacgaggaacgcttcttcccttcgagcggagtcctgatttttggaaaaactggagcagctaataagactacactggaaaatgtgttaatgacaaatgaagaggaaattcgtcctaccaacccggtagccaccgaggaatacgggactgttagcagcaacctgcaggcggctaacactgcagcccagacacaagttgtcaacaaccagggagccttacctggtatggtctggcagaaccgggacgtgtacctgcagggtcccatctgggccaagattcctcacacggacggcaactttcacccgtctccgctgatgggcggctttggactgaagcatccgcctcctcagatcctgatcaaaaacactcctgttcctgctaatcccccggaggtgtttacgcctgccaagtttgcttctttcatcacacagtacagcaccggccaggtcagcgtggagatcgagtgggagctgcagaaggagaacagcaagcgctggaacccagagattcagtatacctccaattttgacaaacagactggtgtggactttgccgttgacagccagggtgtttattctgagcctcgccccattggtactcgttacctcacccgtaatctgtaa

SEQ ID NO: 461 - protein, 738 aa, Artificial Sequence
  source: /note="Description of Artificial Sequence: Synthetic polypeptide"
MAADGYLPDWLEDNLSEGIREWWDLKPGAPKPKANQQKQDDGRGLVLPGYKHLGPFNGLDKGEPVNAADAAALEHDKAYDQQLKAGDNPYLRYNHADAEFQERLQEDTSFGGNLGRAVFQAKKRVLEPLGLVEEGAKTAPGKKRPVEPSPQRSPDSSTGIGKKGQQPARKRLNFGQTGDSESVPDPQPIGEPPAAPSSVGSGTMAAGGGAPMADNNEGADGVGSSSGNWHCDSTWLGDRVITTSTRTWALPTYNNHLYKQISNGTSGGSTNDNTYFGYSTPWGYFDFNRFHCHFSPRDWQRLINNNWGFRPKRLSFKLFNIQVKEVTQNEGTKTIANNLTSTVQVFSDSEYQLPYVLGSAHQGCLPPFPADVFMIPQYGYLTLNNGSQSVGRSSFYCLEYFPSQMLRTGNNFTFSYTFEDVPFHSSYAHSQSLDRLMNPLIDQYLYYLARTQSNAGGTAGNRELQFYQGGPTTMAEQAKNWLPGPCFRQQRVSKTLDQNNNSNFAWTGATKYHLNGRNSLVNPGVAMATHKDDEERFFPSSGVLIFGKTGAANKTTLENVLMTNEEEIRPTNPVATEEYGTVSSNLQAANTAAQTQVVNNQGALPGMVWQNRDVYLQGPIWAKIPHTDGNFHPSPLMGGFGLKHPPPQILIKNTPVPANPPEVFTPAKFASFITQYSTGQVSVEIEWELQKENSKRWNPEIQYTSNFDKQTGVDFAVDSQGVYSEPRPIGTRYLTRNL

SEQ ID NO: 462 - protein, 737 aa, Artificial Sequence
  source: /note="Description of Artificial Sequence: Synthetic polypeptide"
MAADGYLPDWLEDNLSEGIREWWDLKPGAPKPKANQQKQDDGRGLVLPGYKYLGPFNGLDKGEPVNAADAAALEHDKAYDQQLKAGDNPYLRYNHADAEFQERLQEDTSFGGNLGRAVFQAKKRVLEPLGLVEEAAKTAPGKKRPVEPSPQRSPDSSTGIGKKGQQPARKRLNFGQTGDSESVPDPQPIGEPPAGPSGLGSGTMAAGGGAPMADNNKGADGVGNASGNWHCDSTWLGDRVITTSTRTWALPTYNNHLYKQISSQSAGSTNDNVYFGYSTPWGYFDFNRFHCHFSPRDWQRLINSNWGFRPKKLNFKLFNIQVKEVTTNDGVTTIANNLTSTVQVFSDSEYQLPYVLGSAHQGCLPPFPADVFMIPQYGYLTLNNGSQSVGRSSFYCLEYFPSQMLRTGNNFTFSYTFEDVPFHSSYAHSQSLDRLMNPLIDQYLYYLARTQSNAGGTAGNRELQFYQGGPTTMAEQAKNWLPGPCFRQQRVSKTLDQNNNSNFAWTGATKYHLNGRNSLVNPGVAMATHKDDEERFFPSSGVLIFGKTGAANKTTLENVLMTNEEEIRPTNPVATEEYGTVSSNLQAANTAAQTQVVNNQGALPGMVWQNRDVYLQGPIWAKIPHTDGNFHPSPLMGGFGLKHPPPQILIKNTPVPANPPEVFTPAKFASFITQYSTGQVSVEIEWELQKENSKRWNPEIQYTSNFDKQTGVDFAVDSQGVYSEPRPIGTRYLTRNL

SEQ ID NO: 463 - protein, 737 aa, Artificial Sequence
  source: /note="Description of Artificial Sequence: Synthetic polypeptide"
MAADGYLPDWLEDNLSEGIREWWDLKPGAPKPKANQQKQDDGRGLVLPGYKYLGPFNGLDKGEPVNAADAAALEHDKAYDQQLKAGDNPYLRYNHADAEFQERLQEDTSFGGNLGRAVFQAKKRVLEPLGLVEEAAKTAPGKKRPVEPSPQRSPDSSTGIGKKGQQPARKRLNFGQTGDSESVPDPQPIGEPPAGPSGLGSGTMAAGGGAPMADNNEGADGVGNASGNWHCDSTWLGDRVITTSTRTWALPTYNNHLYKQISSQSAGSTNDNVYFGYSTPWGYFDFNRFHCHFSPRDWQRLINSNWGFRPKKLNFKLFNIQVKEVTTNDGVTTIANNLTSTVQVFSDSEYQLPYVLGSAHQGCLPPFPADVFMIPQYGYLTLNNGSQSVGRSSFYCLEYFPSQMLRTGNNFTFSYTFEDVPFHSSYAHSQSLDRLMNPLIDQYLYYLARTQSNAGGTAGNRELQFYQGGPTTMAEQAKNWLPGPCFRQQRVSKTLDQNNNSNFAWTGATKYHLNGRNSLVNPGVAMATHKDDEERFFPSSGVLIFGKTGAANKTTLENVLMTNEEEIRPTNPVATEEYGTVSSNLQAANTAAQTQVVNNQGALPGMVWQNRDVYLQGPIWAKIPHTDGNFHPSPLMGGFGLKHPPPQILIKNTPVPANPPEVFTPAKFASFITQYSTGQVSVEIEWELQKENSKRWNPEIQYTSNFDKQTGVDFAVDSQGVYSEPRPIGTRYLTRNL

SEQ ID NO: 464 - protein, 737 aa, Artificial Sequence
  source: /note="Description of Artificial Sequence: Synthetic polypeptide"
MAADGYLPDWLEDNLSEGIREWWDLKPGAPKPKANQQKQDDGRGLVLPGYKYLGPFNGLDKGEPVNAADAAALEHDKAYDQQLKAGDNPYLRYNHADAEFQERLQEDTSFGGNLGRAVFQAKKRVLEPLGLVEEAAKTAPGKKRPVEPSPQRSPDSSTGIGKKGQQPARKRLNFGQTGDSESVPDPQPIGEPPAGPSGLGSGTMAAGGGAPMADNNEGADGVGNASGNWHCDSTWLGDRVITTSTRTWALPTYNNHLYKQISSQSAGSTNDNVYFGYSTPWGYFDFNRFHCHFSPRDWQRLINNNWGFRPKKLNFKLFNIQVKEVTTNDGVTTIANNLTSTVQVFSDSEYQLPYVLGSAHQGCLPPFPADVFMIPQYGYLTLNNGSQSVGRSSFYCLEYFPSQMLRTGNNFTFSYTFEDVPFHSSYAHSQSLDRLMNPLIDQYLYYLARTQSNAGGTAGNRELQFYQGGPTTMAEQAKNWLPGPCFRQQRVSKTLDQNNNSNFAWTGATKYHLNGRNSLVNPGVAMATHKDDEERFFPSSGVLIFGKTGAANKTTLENVLMTNEEEIRPTNPVATEEYGTVSSNLQAANTAAQTQVVNNQGALPGMVWQNRDVYLQGPIWAKIPHTDGNFHPSPLMGGFGLKHPPPQILIKNTPVPANPPEVFTPAKFASFITQYSTGQVSVEIEWELQKENSKRWNPEIQYTSNFDKQTGVDFAVDSQGVYSEPRPIGTRYLTRNL

SEQ ID NO: 465 - protein, 737 aa, Artificial Sequence
  source: /note="Description of Artificial Sequence: Synthetic polypeptide"
MAADGYLPDWLEDNLSEGIREWWDLKPGAPKPKANQQKQDDGRGLVLPGYKYLGPFNGLDKGEPVNAADAAALEHDKAYDQQLKAGDNPYLRYNHADAEFQERLQEDTSFGGNLGRAVFQAKKRVLEPLGLVEEAAKTAPGKKRPVEPSPQRSPDSSTGIGKKGQQPARKRLNFGQTGDSESVPDPQPIGEPPAGPSGLGSGTMAAGGGAPMADNNKGADGVGNASGNWHCDSTWLGDRVITTSTRTWALPTYNNHLYKQISSQSAGSTNDNVYFGYSTPWGYFDFNRFHCHFSPRDWQRLINNNWGFRPKKLNFKLFNIQVKEVTTNDGVTTIANNLTSTVQVFSDSEYQLPYVLGSAHQGCLPPFPADVFMIPQYGYLTLNNGSQSVGRSSFYCLEYFPSQMLRTGNNFTFSYTFEDVPFHSSYAHSQSLDRLMNPLIDQYLYYLARTQSNAGGTAGNRELQFYQGGPTTMAEQAKNWLPGPCFRQQRVSKTLDQNNNSNFAWTGATKYHLNGRNSLVNPGVAMATHKDDEERFFPSSGVLIFGKTGAANKTTLENVLMTNEEEIRPTNPVATEEYGTVSSNLQAANTAAQTQVVNNQGALPGMVWQNRDVYLQGPIWAKIPHTDGNFHPSPLMGGFGLKHPPPQILIKNTPVPANPPEVFTPAKFASFITQYSTGQVSVEIEWELQKENSKRWNPEIQYTSNFDKQTGVDFAVDSQGVYSEPRPIGTRYLTRNL

SEQ ID NO: 466 - DNA, 2214 bp, Artificial Sequence
  source: /note="Description of Artificial Sequence: Synthetic polynucleotide"
atggctgctgacggttatcttccagattggctcgaggacaacctctctgagggcattcgcgagtggtgggacctgaaacctggagcccccaagcccaaggccaaccagcagaagcaggacgacggccggggtctggtgcttcctggctacaagtacctcggacccttcaacggactcgacaagggggagcccgtcaacgcggcggacgcagcggccctcgagcacgacaaggcctacgaccagcagctcaaagcgggtgacaatccgtacctgcggtataaccacgccgacgccgagtttcaggagcgtctgcaagaagatacgtcttttgggggcaacctcgggcgagcagtcttccaggccaagaagcgggttctcgaacctctcggtctggttgaggaagctgctaagacggctcctggaaagaagagaccggtagaaccgtcacctcagcgttcccccgactcctccacgggcatcggcaagaaaggccagcagcccgctagaaagagactgaactttgggcagactggcgactcagagtcagtccccgaccctcaaccaatcggagaaccaccagcaggcccctctggtctgggatctggtacaatggctgcaggcggtggcgcaccaatggctgacaataacaagggcgccgacggagtgggtaatgcctcaggaaattggcattgcgattccacatggctgggcgacagagtcatcaccaccagcacccgaacctgggctttgcccacctacaacaaccacctctacaagcaaatctccagtcagtcagcaggtagcaccaacgacaacgtctacttcggctacagcaccccctgggggtattttgacttcaacagattccactgtcacttctcaccacgtgactggcagcggctcatcaacagcaactggggattccggcccaagaagctcaacttcaagctgttcaacatccaggtcaaggaggtcacaacgaatgacggcgtcacgaccatcgccaataaccttaccagcacggttcaggtcttttcggactcggaataccagctgccctacgtcctcggctccgcacaccagggctgcctgcctccgttcccggcggacgtcttcatgattccccagtacggctacctgactctgaacaatggcagccaatcggtgggtcgttcctctttctactgcctggaatatttcccttctcaaatgctgagaacgggcaacaacttcaccttcagctacaccttcgaggacgttcccttccacagcagctacgcacacagccagagcctggaccggctgatgaatcctcttatcgaccagtacctgtattacctggccagaacacagagcaacgcaggaggcacagctggcaatcgggaactgcagttttatcagggcgggcctaccaccatggccgaacaagccaaaaactggctgcctggaccttgcttccggcaacaaagagtctccaagacgctggatcaaaacaacaacagcaactttgcttggactggtgccaccaaataccatctaaatggaagaaattcattggttaatcccggtgtcgccatggcaacccacaaggacgacgaggaacgcttcttcccttcgagcggagtcctgatttttggaaaaactggagcagctaataagactacactggaaaatgtgttaatgacaaatgaagaggaaattcgtcctaccaacccggtagccaccgaggaatacgggactgttagcagcaacctgcaggcggctaacactgcagcccagacacaagttgtcaacaaccagggagccttacctggtatggtctggcagaaccgggacgtgtacctgcagggtcccatctgggccaagattcctcacacggacggcaactttcacccgtctccgctgatgggcggctttggactgaagcatccgcctcctcagatcctgatcaaaaacactcctgttcctgctaatcccccggaggtgtttacgcctgccaagtttgcttctttcatcacacagtacagcaccggccaggtcagcgtggagatcgagtgggagctgcagaaggagaacagcaagcgctggaacccagagattcagtatacctccaattttgacaaacagactggtgtggactttgccgttgacagccagggtgtttattctgagcctcgccccattggtactcgttacctcacccgtaatctgtaa

SEQ ID NO: 467 - DNA, 2217 bp, Artificial Sequence
  source: /note="Description of Artificial Sequence: Synthetic polynucleotide"
atggctgccgatggttatcttccagattggctcgaggacaacctctctgagggcattcgcgagtggtgggacctgaaacctggagccccgaaacccaaagccaaccagcaaaagcaggacgacggccggggtctggtgcttcctggctacaagtacctcggacccttcaacggactcgacaagggggagcccgtcaacgcggcggacgcagcggccctcgagcacgacaaggcctacgaccagcagctcaaagcgggtgacaatccgcacctgcggtataatcacgccgacgccgagtttcaggagcgtctgcaagaagatacgtcttttgggggcaacctcgggcgagcagtcttccaggccaagaagcgggttctcgaacctctcggtctggttgaggaaggcgctaagacggctcctggaaagaagagaccggtagagccgtcaccacagcgttcccccgactcctccacgggcatcggcaagaaaggccagcagcccgccagaaagagactcaatttcggtcagactggcgactcagagtcagtccccgaccctcaacttatcggagaacctccagcagcgccctctagtgtgggatctggtacaatggctgcaggcggtggcgcaccaatggcagacaataacgaaggtgccgacggagtgggtagttcctcgggaaattggcattgcgattccacatggctgggcgacagagtcatcaccaccagcacccgaacctgggccctgcccacctacaacaaccacctctacaagcaaatctccaacgggacctcgggaggcagcaccaacgacaacacctactttggctacagcaccccctgggggtattttgactttaacagattccactgccacttctcaccacgtgactggcagcgactcatcaacaacaactggggattccggcccaagagactcagcttcaagctcttcaacatccaggtcaaagaggtcacgcagaatgaaggcaccaagaccatcgccaataacctcaccagcaccatccaggtgtttacggactcggagtaccagctgccgtacgtcctcggctctgcccaccagggctgcctgcctccgttcccggcggacgtcttcatgattcctcagtacggcaacctgactctcaacaacggtagtcaggccgtgggacgttcctccttctactgcctggagtacttcccctctcagatgctgagaacgggcaacaacttttccttcagctacactttcgaggacgtgcctttccacagcagctacgcgcacagccagagtttggacaggctgatgaatcctctcatcgaccagtacctgtactacctgtcaagaacccagtctacgggaggcacagcgggaacccagcagttgctgttttctcaggccgggcctagcaacatgtcggctcaggccagaaactggctgcctggaccctgctacagacagcagcgcgtctccacgacactgtcgcaaaacaacaacagcaactttgcctggactggtgccaccaagtatcatctgaacggcagagactctctggtgaatccgggcgtcgccatggcaaccaacaaggacgacgaggaccgcttcttcccatccagcggcatcctcatgtttggcaagcagggagctggaaaagacaacatgggctatagcaacgtgatgctaaccagcgaggaagaaatcaagaccaccaaccccgtggccacagaacagtatggcgtggtggctgataacctacagcagcaaaacaccgctcctattgtgggggccgtcaacagccagggagccttacctggcatggtctggcagaaccgggacgtgtacctgcagggtcctatttgggccaagattcctcacacagatggcaactttcacccgtctcctttaatgggcggctttggacttaaacatccgcctcctcagatcctcatcaaaaacactcctgttcctgcggatcctccaacagcgttcaaccaggccaagctgaattctttcatcacgcagtacggcaccggacaagtcagcgtggagatcgagtgggagctgcagaaggagaacagcaagcgctggaacccagagattcagtatacttccaactactacaaatctacaaatgtggactttgctgttaatactgagggtgtttactctgagcctcgccccattggcactcgttacctcacccgtaatctgtaa

SEQ ID NO: 468 - protein, 738 aa, Artificial Sequence
  source: /note="Description of Artificial Sequence: Synthetic polypeptide"
MAADGYLPDWLEDNLSEGIREWWDLKPGAPKPKANQQKQDDGRGLVLPGYKYLGPFNGLDKGEPVNAADAAALEHDKAYDQQLKAGDNPHLRYNHADAEFQERLQEDTSFGGNLGRAVFQAKKRVLEPLGLVEEGAKTAPGKKRPVEPSPQRSPDSSTGIGKKGQQPARKRLNFGQTGDSESVPDPQLIGEPPAAPSSVGSGTMAAGGGAPMADNNEGADGVGSSSGNWHCDSTWLGDRVITTSTRTWALPTYNNHLYKQISNGTSGGSTNDNTYFGYSTPWGYFDFNRFHCHFSPRDWQRLINNNWGFRPKRLSFKLFNIQVKEVTQNEGTKTIANNLTSTIQVFTDSEYQLPYVLGSAHQGCLPPFPADVFMIPQYGNLTLNNGSQAVGRSSFYCLEYFPSQMLRTGNNFSFSYTFEDVPFHSSYAHSQSLDRLMNPLIDQYLYYLSRTQSTGGTAGTQQLLFSQAGPSNMSAQARNWLPGPCYRQQRVSTTLSQNNNSNFAWTGATKYHLNGRDSLVNPGVAMATNKDDEDRFFPSSGILMFGKQGAGKDNMGYSNVMLTSEEEIKTTNPVATEQYGVVADNLQQQNTAPIVGAVNSQGALPGMVWQNRDVYLQGPIWAKIPHTDGNFHPSPLMGGFGLKHPPPQILIKNTPVPADPPTAFNQAKLNSFITQYGTGQVSVEIEWELQKENSKRWNPEIQYTSNYYKSTNVDFAVNTEGVYSEPRPIGTRYLTRNL

SEQ ID NO: 469 - DNA, 2217 bp, Artificial Sequence
  source: /note="Description of Artificial Sequence: Synthetic polynucleotide"
atggctgccgatggttatcttccagattggctcgaggacaacctctctgagggcattcgcgagtggtgggacctgaaacctggagccccgaaacccaaagccaaccagcaaaagcaggacgacggccggggtctggtgcttcctggctacaagtacctcggacccttcaacggactcgacaagggggagcccgtcaacgcggcggacgcagcggccctcgagcacgacaaggcctacgaccagcagctcaaagcgggtgacaatccgtacctgcggtataatcacgccgacgccgagtttcaggagcgtctgcaagaagatacgtcttttgggggcaacctcgggcgagcagtcttccaggccaagaagcgggttctcgaacctctcggtctggttgaggaaggcgctaagacggctcctggaaagaagagaccggtagagccgtcaccacagcgttcccccgactcctccacgggcatcggcaagaaaggccagcagcccgccggaaagagactcaatttcggtcagactggcgactcagagtcagtccccgaccctcaacctatcggagaacctccagcagcgccctctagtgtgggatctggtacaatggctgcaggcggtggcgcaccaatggcagacaataacgaaggtgccgacggagtgggtagttcctcgggaaattggcattgcgattccacatggctgggcgacagagtcatcaccaccagcacccgaacctgggccctgcccacctacaacaaccacctctacaagcaaatctccaacgggacctcgggaggcagcaccaacgacaacacctactttggctacagcaccccctgggggtattttgactttaacagattccactgccacttctcaccacgtgactggcagcgactcatcaacaacaactggggattccggcccaagagactcagcttcaagctcttcaacatccaggtcaaagaggtcacgcagaatgaaggcaccaagaccatcgccaataacctcaccagcaccatccaggtgtttacggactcggaataccagctgccgtacgtcctcggctctgcccaccagggctgcctgcctccgttcccggcggacgtcttcatgattcctcagtacggctacctgactctcaacaacggtagtcaggccgtgggacgttcctccttctactgcctggagtacttcccctctcagatgctgagaacgggcaacaacttttccttcagctacactttcgaggacgtgcctttccacagcagctacgcgcacagccagagtttggacaggctgatgaatcctctcgtcgaccagtacctgtactacctgtcaagaacccagtctacgggaggcacagcgggaacccagcagttgctgttttctcaggccgggcctagcaacatgtcggctcaggccagaaactggctgcctggaccctgctacagacagcagcgcgtctccacgacactgtcgcaaaacaacaacagcaactttgcctggactggtgccaccaagtatcatctgaacggcagagactctctggtgaatccgggcgtcgccatggcaaccaacaaggacgacgaggaccgcttcttcccatccagcggcatcctcatgtttggcaagcagggagctggaaaagacaacgtggactatagcaacgtgatgctaaccagcgaggaagaaatcaagaccaccaaccccgtggccacagaacagtatggcgtggtggctgataacctacagcagcaaaacaccgctcctattgtgggggccgtcaacagccagggagccttacctggcatggtctggcagaaccgggacgtgtacctgcagggtcctatttgggccaagattcctcacacagatggcaactttcacccgtctcctttaatgggcggctttggacttaaacatccgcctcctcagatcctcatcaaaaacactcctgttcctgcggatcctccaacagcgttcaaccaggccaagctgaattctttcatcacgcagtacagcaccggacaagtcagcgtggagatcgagtgggagctgcagaaggagaacagcaagcgctggagcccagagattcagtatacttccaactactacaaatctacaaatgtggactttgctgttaatactgagggtgtttactctgagcctcgccccattggcactcgttacctcacccgtaatctgtaa

SEQ ID NO: 470 - protein, 738 aa, Artificial Sequence
  source: /note="Description of Artificial Sequence: Synthetic polypeptide"
MAADGYLPDWLEDNLSEGIREWWDLKPGAPKPKANQQKQDDGRGLVLPGYKYLGPFNGLDKGEPVNAADAAALEHDKAYDQQLKAGDNPYLRYNHADAEFQERLQEDTSFGGNLGRAVFQAKKRVLEPLGLVEEGAKTAPGKKRPVEPSPQRSPDSSTGIGKKGQQPAGKRLNFGQTGDSESVPDPQPIGEPPAAPSSVGSGTMAAGGGAPMADNNEGADGVGSSSGNWHCDSTWLGDRVITTSTRTWALPTYNNHLYKQISNGTSGGSTNDNTYFGYSTPWGYFDFNRFHCHFSPRDWQRLINNNWGFRPKRLSFKLFNIQVKEVTQNEGTKTIANNLTSTIQVFTDSEYQLPYVLGSAHQGCLPPFPADVFMIPQYGYLTLNNGSQAVGRSSFYCLEYFPSQMLRTGNNFSFSYTFEDVPFHSSYAHSQSLDRLMNPLVDQYLYYLSRTQSTGGTAGTQQLLFSQAGPSNMSAQARNWLPGPCYRQQRVSTTLSQNNNSNFAWTGATKYHLNGRDSLVNPGVAMATNKDDEDRFFPSSGILMFGKQGAGKDNVDYSNVMLTSEEEIKTTNPVATEQYGVVADNLQQQNTAPIVGAVNSQGALPGMVWQNRDVYLQGPIWAKIPHTDGNFHPSPLMGGFGLKHPPPQILIKNTPVPADPPTAFNQAKLNSFITQYSTGQVSVEIEWELQKENSKRWSPEIQYTSNYYKSTNVDFAVNTEGVYSEPRPIGTRYLTRNL

SEQ ID NO: 471 - DNA, 2217 bp, Artificial Sequence
  source: /note="Description of Artificial Sequence: Synthetic polynucleotide"
atggttgccgatggttatcttccagattggctcgaggacaacctctctgagggcattcgcgagtggtgggacctgaaacctggagccccgaaacccaaagccaaccagcaaaagcagggcgacggccggggtctggtgcttcctggctacaagtacctcggacccttcaacggactcgacaagggggagcccgtcaacgcggcggacgcagcggccctcgagcacgacaaggcctacgaccagcagcttaaagcgggtgacaatccgtacctgcggtataatcacgccgacgccgagcttcaggagcgtctgcaagaagatacgtcttttgggggcaacctcgggcgagcagtcttccaggccaagaagcgggttctcgaacctctcggtctggttgaggaaggcgctaagacggctcctggaaagaagagaccggtagagccgtcaccacagcgttcccccgactcctccacgggcatcggcaagaaaggccagcagcccgccagaaagagactcaatttcggtcagactggcgactcagagtcagtccccgaccctcaacctatcggagaacctccagcagcgccctctagtgtgggatctggtacaatggctgcaggcggtggcgcgccaatggcagacaataacgaaggtgccgacggagtgggtagttcctcgggaaattggcattgcgattccacatggctgggcgacagagtcatcaccaccagcacccgaacctgggccctgcccacctacaacaaccacctctacaagcaaatctccaacgggacctcgggaggcagcaccaacgacaacacctactttggctacagcaccccctgggggtattttgactttaacagattccactgccacttctcaccacgtgactggcagcgactcatcaacaacaactggggattccggcccaagagactcagcttcaagctcttcaacatccaggtcaaagaggtcacgcagaatgaaggcaccaagaccatcgccaataacctcaccagcaccatccaggtgtttacggactcggaataccagctgccgtacgtcctcggctctgcccaccagggctgccagcctccgttcccggcggacgtcttcatgattcctcagtacggctacctgactctcaacaacggtagtcaggccgtgggacgttcctccttctactgcctggagtacttcccctctcagatgctgagaacgggcaacaacttttccttcagctacactttcgaggacgtgcctttccacagcagctacgcgcacagccagagtttggacaggctgatgaatcctctcatcgaccagtacctgtactacctgtcaagaacccagtctacgggaggcacagcgggaacccagcagttgctgttttctcaggccgggcctagcaacatgtcggctcaggccagaaactggctgcctggaccctgctacagacagcagcgcgtctccacgacactgtcgcaaaacaacaacagcaactttgcctggactggtgccaccaagtatcatctgaacggcagagactctctggtgaatccgggcgtcgccatggcaaccaacaaggacgacgaggaccgcttcttcccatccagcggcatcctcatgtttggcaagcagggagctggaaaagacaacgtggactatagcaacgtgatgctaaccagcgaggaagaaatcaagaccaccaaccccgtggccacagaacagtatggcgtggtggctgataacctacagcagcaaaacaccgctcctattgtgggggccgtcaacagccagggagccttacctggcatggtctggcagaaccgggacgtgtacctgcagggtcctatttgggccaagattcctcacacagatggcaactttcacccgtctcctttaatgggcggctttggacttaaacatccgcctcctcagatcctcatcaaaaacactcctgttcctgcggatcctccaacagcgttcaaccaggccaagctgaattctttcatcacgcagtacagcaccggacaagtcagcgtggagatcgagtgggagccgcagaaggagaacagcaagcgctggaacccagagattcagtatacttccaactactacaaatctacaaatgtggactttgctgttaatactgagggtgtttactctgagcctcgccccattggcactcgttacctcacccgtaatctgtaa

SEQ ID NO: 472 - protein, 738 aa, Artificial Sequence
  source: /note="Description of Artificial Sequence: Synthetic polypeptide"
MVADGYLPDWLEDNLSEGIREWWDLKPGAPKPKANQQKQGDGRGLVLPGYKYLGPFNGLDKGEPVNAADAAALEHDKAYDQQLKAGDNPYLRYNHADAELQERLQEDTSFGGNLGRAVFQAKKRVLEPLGLVEEGAKTAPGKKRPVEPSPQRSPDSSTGIGKKGQQPARKRLNFGQTGDSESVPDPQPIGEPPAAPSSVGSGTMAAGGGAPMADNNEGADGVGSSSGNWHCDSTWLGDRVITTSTRTWALPTYNNHLYKQISNGTSGGSTNDNTYFGYSTPWGYFDFNRFHCHFSPRDWQRLINNNWGFRPKRLSFKLFNIQVKEVTQNEGTKTIANNLTSTIQVFTDSEYQLPYVLGSAHQGCQPPFPADVFMIPQYGYLTLNNGSQAVGRSSFYCLEYFPSQMLRTGNNFSFSYTFEDVPFHSSYAHSQSLDRLMNPLIDQYLYYLSRTQSTGGTAGTQQLLFSQAGPSNMSAQARNWLPGPCYRQQRVSTTLSQNNNSNFAWTGATKYHLNGRDSLVNPGVAMATNKDDEDRFFPSSGILMFGKQGAGKDNVDYSNVMLTSEEEIKTTNPVATEQYGVVADNLQQQNTAPIVGAVNSQGALPGMVWQNRDVYLQGPIWAKIPHTDGNFHPSPLMGGFGLKHPPPQILIKNTPVPADPPTAFNQAKLNSFITQYSTGQVSVEIEWEPQKENSKRWNPEIQYTSNYYKSTNVDFAVNTEGVYSEPRPIGTRYLTRNL

SEQ ID NO: 473 - DNA, 2217 bp, Artificial Sequence
  source: /note="Description of Artificial Sequence: Synthetic polynucleotide"
atggctgccgatggttatcttccagattggctcgaggacaacctctctgagggcattcgcgagtggtgggacctgaaacctggagccccgaaacccaaagccaaccagcaaaagcaggacgacggccggggtctggtgcttcctggctacaagtacctcggacccttcaacggactcgacaagggggagcccgtcaacgcggcggacgcagcggccctcgagcacgacaaggcctacgaccagcagctcaaagcgggtgacaatccgtacctgcggtataatcacgccgacgccgagtttcaggagcgtctgcaagaagatacgtcttttgggggcaacctcgggcgagcagtcttccaggccaagaagcgggttctcgaacctctcggtctggttgaggaaggcgctaagacggctcctggaaagaagagaccggtagagccgtcaccacagcgttcccccgactcctccacgggcatcggcaagaaaggccagcagcccgccagaaagagactcaatttcggtcagactggcgactcagagtcagtccccgaccctcaacctatcggagaacctccagcagcgccctctagtgtgggatctggtacaatggctgcaggcggtggcgcaccaatggcagacaataacgaaggtgccgacggagtgggtagttcctcgggaaattggcattgcgattccacatggctgggcgacagagtcatcaccaccagcacccgaacctgggccctgcccacctacaacaaccacctctacaagcaaatctccaacgggacctcgggaggcagcaccaacgacaacacctactttggctacagcaccccctgggggtattttgactttaacagattccactgccacttctcaccacgtgactggcagcgactcatcaacaacaactggggattccggcccaagagactcagcttcaagctcttcaacatccaggtcaaagaggtcacgcagaatgaaggcaccaagaccatcgccaatagcctcaccagcaccatccaggtgtttacggactcggaataccagctgccgtacgtcctcggctctgcccaccagggctgcctgcctccgttcccggcggacgtcttcatgattcctcagtacggctacctgactcccaacaacggtagtcaggccgtgggacgttcctccttctactgcctggagtacttcccctctcagatgctgagaacgggcaacaacttttccttcagctacactttcgaggacgtgcctttccacagcagctacgcgcacagccagagtttggacaggctgatgaatcctctcatcgaccagtacctgtactacctgtcaagaacccagtctacgggaggcacagcgggaacccagcagttgctgtcttctcaggccgggcctagcaacatgtcggctcaggccagaaactggctgcctggaccctgctacagacagcagcgcgtctccacgacactgtcgcaaaacaacaacagcaactttgcctggactggtgccaccaagtatcatctgaacggcagagactctctggtgaatccgggcgtcgccatggcaaccaacaaggacgacgaggaccgcttcttcccatccagcggcatcctcatgtttggcaagcagggagctggaaaagacaacgtggactatagcaacgtgatgctaaccagcgaggaagaaatcaagaccaccaaccccgtggccacagaacagtatggcgtggtggctgataacctacagcagcaaaacaccgctcctattgtgggggccgtcaacagccagggagccttacctggcatggtctggcagaaccgggacgtgtacttgcagggtcctatttgggccaagattcctcacacagatggcaactttcacccgtctcctttaatgggcggctttggacttaaacatccgcctcctcagatcctcatcaaaaacactcctgttcctgcggatcctccaacagcgttcaaccaggccaagctgaattctttcatcacgcagtacagcaccggacaagtcagcgtggagatcgagtgggagctgcagaaggagaacagcaagcgctggaacccagagattcagtatacttccaactactacaaatctacaaatgtggactttgctgttaatactgagggtgtttactctgagcctcgccccattggcactcgttacctcacccgtaatctgtaa

SEQ ID NO: 474 - protein, 738 aa, Artificial Sequence
  source: /note="Description of Artificial Sequence: Synthetic polypeptide"
MAADGYLPDWLEDNLSEGIREWWDLKPGAPKPKANQQKQDDGRGLVLPGYKYLGPFNGLDKGEPVNAADAAALEHDKAYDQQLKAGDNPYLRYNHADAEFQERLQEDTSFGGNLGRAVFQAKKRVLEPLGLVEEGAKTAPGKKRPVEPSPQRSPDSSTGIGKKGQQPARKRLNFGQTGDSESVPDPQPIGEPPAAPSSVGSGTMAAGGGAPMADNNEGADGVGSSSGNWHCDSTWLGDRVITTSTRTWALPTYNNHLYKQISNGTSGGSTNDNTYFGYSTPWGYFDFNRFHCHFSPRDWQRLINNNWGFRPKRLSFKLFNIQVKEVTQNEGTKTIANSLTSTIQVFTDSEYQLPYVLGSAHQGCLPPFPADVFMIPQYGYLTPNNGSQAVGRSSFYCLEYFPSQMLRTGNNFSFSYTFEDVPFHSSYAHSQSLDRLMNPLIDQYLYYLSRTQSTGGTAGTQQLLSSQAGPSNMSAQARNWLPGPCYRQQRVSTTLSQNNNSNFAWTGATKYHLNGRDSLVNPGVAMATNKDDEDRFFPSSGILMFGKQGAGKDNVDYSNVMLTSEEEIKTTNPVATEQYGVVADNLQQQNTAPIVGAVNSQGALPGMVWQNRDVYLQGPIWAKIPHTDGNFHPSPLMGGFGLKHPPPQILIKNTPVPADPPTAFNQAKLNSFITQYSTGQVSVEIEWELQKENSKRWNPEIQYTSNYYKSTNVDFAVNTEGVYSEPRPIGTRYLTRNL

SEQ ID NO: 475 - protein, 738 aa, Artificial Sequence
  source: /note="Description of Artificial Sequence: Synthetic polypeptide"
MAADGYLPDWLEDNLSEGIREWWDLKPGAPKPKANQQKQDDGRGLVLPGYKYLGPFNGLDKGEPVNAADAAALEHDKAYDQQLKAGDNPYLRYNHADAEFQERLQEDTSFGGNLGRAVFQAKKRVLEPLGLVEEGAKTAPGKKRPVEPSPQRSPDSSTGIGKKGQQPARKRLNFGQTGDSESVPDPQPIGEPPAAPSSVGSGTMAAGGGAPMADNNEGADGVGSSSGNWHCDSTWLGDRVITTSTRTWALPTYNNHLYKQISNGTSGGSTNDNTYFGYSTPWGYFDFNRFHCHFSPRDWQRLINNNWGFRPKRLSFKLFNIQVKEVTQNEGTKTIANNLTSTIQVFTDSEYQLPYVLGSAHQGCLPPFPADVFMIPQYGYLTLNNGSQAVGRSSFYCLEYFPSQMLRTGNNFSFSYTFEDVPFHSSYVHSQSLDRLMNPLIDQYLYYLSRTQSTGGTAGTQQLLFSQAGPSNMSAQARNWLPGPCYRQQRVSTTLSQNNNSNFAWTGATKYHLNGRDSLVNSGVAMATNKDDEDRFFPSSGILMFGKQGAGKDNVDYSNVMLTSEEEIKTTNPVATEQYGVVADNLQQQNTAPIVGAVNSQGALPGMVWQNRDVYLQGPIWAKIPHTDGNFHPSPLMGGFGLKHPPPQILIKNTPVPADPPTAFNQAKLNSFITQYSTGQVSVEIEWELQKENSKRWNPEIQYTSNYYKSTNVDFAVNTEGVYSEPRPIGTRYPTRNL

SEQ ID NO: 476 - DNA, 2217 bp, Artificial Sequence
  source: /note="Description of Artificial Sequence: Synthetic polynucleotide"
atggctgccgatggttatcttccagattggctcgaggacaacctctctgagggcattcgcgagtggtgggacctgaaacctggagccccgaaacccaaagccaaccagcaaaagcaggacgacggccggggtctggtgcttcctggctacaagtacctcggacccttcaacggactcgacaagggggagcccgtcaacgcggcggacgcagcggccctcgagcacgacaaggcctacgaccagcagctcaaagcgggtgacaatccgtacctgcggtataatcacgccgacgccgagtttcaggagcgtctgcaagaagatacgtcttttgggggcaacctcgggcgagcagtcttccaggccaagaagcgggttctcgaacctctcggtctggttgaggaaggcgctaagacggctcctggaaagaagagaccggtagagccgtcaccacagcgttcccccgactcctccacgggcatcggcaagaaaggccagcagcccgccagaaagagactcaatttcggtcagactggcgactcagagtcagtccccgaccctcaacctatcggagaacctccagcagcgccctctagtgtgggatctggtacaatggctgcaggcggtggcgcaccaatggcagacaataacgaaggtgccgacggagtgggtagttcctcgggaaattggcattgcgattccacatggctgggcgacagagtcatcaccaccagcacccgaacctgggccctgcccacctacaacaaccacctctacaagcaaatctccaacgggacctcgggaggcagcaccaacgacaacacctactttggctacagcaccccctgggggtattttgactttaacagattccactgccacttctcaccacgtgactggcagcgactcatcaacaacaactggggattccggcccaagagactcagcttcaagctcttcaacatccaggtcaaagaggtcacgcagaatgaaggcaccaagaccatcgccaataacctcaccagcaccatccaggtgtttacggactcggaataccagctgccgtacgtcctcggctctgcccaccagggctgcctgcctccgttcccggcggacgtcttcatgattcctcagtacggctacctgactctcaacaacggtagtcaggccgtgggacgttcctccttctactgcctggagtacttcccctctcagatgctgagaacgggcaacaacttttccttcagctacactttcgaggacgtgcctttccacagcagctacgtgcacagccagagtttggacaggctgatgaatcctctcatcgaccagtacctgtactacctgtcaagaacccagtctacgggaggcacagcgggaacccagcagttgctgttttctcaggccgggcctagcaacatgtcggctcaggccagaaactggctgcctggaccctgctacagacagcagcgcgtctccacgacactgtcgcaaaacaacaacagcaactttgcctggactggtgccaccaagtatcatctgaacggcagagactctctggtgaattcgggcgtcgccatggcaaccaacaaggacgacgaggaccgcttcttcccatccagcggcatcctcatgtttggcaagcagggagctggaaaagacaacgtggactatagcaacgtgatgctaaccagcgaggaagaaatcaagaccaccaaccccgtggccacagaacagtatggcgtggtggctgataacctacagcagcaaaacaccgctcctattgtgggggccgtcaacagccagggagccttacctggcatggtctggcagaaccgggacgtgtacctgcagggtcctatttgggccaagattcctcacacagatggcaactttcacccgtctcctttaatgggcggctttggacttaaacatccgcctcctcagatcctcatcaaaaacactcctgttcctgcggatcctccaacagcgttcaaccaggccaagctgaattctttcatcacgcagtacagcaccggacaagtcagcgtggagatcgagtgggagctgcagaaggagaacagcaagcgctggaacccagagattcagtatacttccaactactacaaatctacaaatgtggactttgctgttaatactgagggtgtttactctgagcctcgccccattggcactcgttaccccacccgtaatctgtaa

SEQ ID NO: 477 - protein, 734 aa, Artificial Sequence; identical to SEQ ID NO: 302
  source: /note="Description of Artificial Sequence: Synthetic polypeptide"

SEQ ID NO: 478 - DNA, 2214 bp, Artificial Sequence
  source: /note="Description of Artificial Sequence: Synthetic polynucleotide"
atggctgctgacggttatcttccagattggctcgaggacaacctctctgagggcattcgcgagtggtgggacctgaaacctggagccccgaaacccaaagccaaccagcagaagcaggacgacggccggggtctggtgcttcctggctacaagtacctcggacccttcaacggactcgacaagggggagcccgtcaacgcggcggacgcagcggccctcgagcacgacaaggcctacgaccagcagctcaaagcgggtgacaatccgtacctgcggtataaccacgccgacgccgagtttcaggagcgtctgcaagaagatacgtcttttgggggcaacctcgggcgagcagtcttccaggccaagaagcgggttctcgaacctctcggtctggttgaggaagctgctaagacggctcctggaaagaagagaccggtagaaccgtcacctcagcgttcccccgactcctccacgggcatcggcaagaaaggccagcagcccgctagaaagagactgaactttgggcagactggcgactcagagtcagtccccgaccctcaacctctcggagaaccaccagcaggcccctctggtctgggatctggtacaatggctgcaggcggtggcgctccaatggcagacaataacgaaggcgccgacggagtgggtaatgcctcaggaaattggcattgcgattccacatggctgggcgacagagtcatcaccaccagcacccgaacctgggctttgcccacctacaacaaccacctctacaagcaaatctccagtcagtcagcaggtagcaccaacgacaacgtctacttcggctacagcaccccctgggggtattttgacttcaacagattccactgtcacttctcaccacgtgactggcagcgactcatcaacaacaactggggattccggcccaagaagctcaacttcaagctcttcaacatccaagtcaaggaggtcacgacgaatgacggcgtcacgaccatcgctaataaccttaccagcacggttcaggtcttttcggactcggagtaccagctgccgtacgtcctcggctctgcccaccagggctgcctgcctccgttcccggcggacgtcttcatgattcctcagtacggctacctgactctgaacaatggcagccaatcggtgggacgttcatccttctactgcctggaatacttcccttctcaggtgctgagaacgggtaacaacttcaccttcagttacaccttcgaggacgtgcctttccacagcagctacgcgcacagccagagcctagaccggctgatgaatcccctcatcgaccagtacctgtattacctggctagaacacagagtaacccaggaggcacatctggcaatcgggaactgcagttttaccagggcgggccttccaccatggccgaacaagccaagaactggttacctggaccttgcttccggcaacaaagagtttccaaaacactggatcaaaacaacaacagcaactttgcttggactggtgccaccaaatatcacctgaacggcagaaactcattggtgaatcctggtgtcgccatggcaactcacaaggacgacgaggaccgctttttcccatccagcggagtcctgatttttggaaaaactggagcaaccaacaagactacattggaaaacgtgttaatgacaaatgaagaagaaattcgtcctactaatcctgtggccacagaagaatacgggatagtcagcagcaatttacaagcggccaatactgcagcccagacacaagttgtcaacaaccagggagccttacctggcatggtctggcagaaccgggacgtgtacctgcagggtcccatctgggccaaaattcctcacacagacggcaactttcacccgtctccgctgatgggcggctttggactgaagcatccgcctcctcagatcctgatcaaaaacactcctgttcctgctaatcccccggaggtgtttacgcctgccaagtttgcttctttcatcacacagtacagcaccggccaggtcagcgtggagatcgagtgggagctgcagaaggagaacagcaagcgctggaacccagagattcagtatacctccaattttgacaaacagactggtgtggactttgccgttgacagccagggtgtttattctgagcctcgccccattggtactcgttacctcacccgtaatctgtaa

SEQ ID NO: 479 - protein, 737 aa, Artificial Sequence
  source: /note="Description of Artificial Sequence: Synthetic polypeptide"
MAADGYLPDWLEDNLSEGIREWWDLKPGAPKPKANQQKQDDGRGLVLPGYKYLGPFNGLDKGEPVNAADAAALEHDKAYDQQLKAGDNPYLRYNHADAEFQERLQEDTSFGGNLGRAVFQAKKRVLEPLGLVEEAAKTAPGKKRPVEPSPQRSPDSSTGIGKKGQQPARKRLNFGQTGDSESVPDPQPLGEPPAGPSGLGSGTMAAGGGAPMADNNEGADGVGNASGNWHCDSTWLGDRVITTSTRTWALPTYNNHLYKQISSQSAGSTNDNVYFGYSTPWGYFDFNRFHCHFSPRDWQRLINNNWGFRPKKLNFKLFNIQVKEVTTNDGVTTIANNLTSTVQVFSDSEYQLPYVLGSAHQGCLPPFPADVFMIPQYGYLTLNNGSQSVGRSSFYCLEYFPSQVLRTGNNFTFSYTFEDVPFHSSYAHSQSLDRLMNPLIDQYLYYLARTQSNPGGTSGNRELQFYQGGPSTMAEQAKNWLPGPCFRQQRVSKTLDQNNNSNFAWTGATKYHLNGRNSLVNPGVAMATHKDDEDRFFPSSGVLIFGKTGATNKTTLENVLMTNEEEIRPTNPVATEEYGIVSSNLQAANTAAQTQVVNNQGALPGMVWQNRDVYLQGPIWAKIPHTDGNFHPSPLMGGFGLKHPPPQILIKNTPVPANPPEVFTPAKFASFITQYSTGQVSVEIEWELQKENSKRWNPEIQYTSNFDKQTGVDFAVDSQGVYSEPRPIGTRYLTRNL

SEQ ID NO: 480 - DNA, 2214 bp, Artificial Sequence
  source: /note="Description of Artificial Sequence: Synthetic polynucleotide"
atggctgccgatggttatcttccagattggctcgaggacaacctctctgagggcattcgcgagtggtgggacctgaaacctggagccccgaaacccaaagccaaccagcaaaagcaggacgacggccggggtctggtgcttcctggctacaagtacctcggacccttcaacggactcgacaagggggagcccgtcaacgcggcggacgcagcggccctcgagcacgacaaggcctacgaccagcagctcaaagcgggtgacaatccgtacctgcggtataatcacgccgacgccgagtttcaggagcgtctgcaagaagatacgtcttttgggggcaacctcgggcgagcagtcttccaggccaagaagcgggttctcgaacctctcggtctggttgaggaaggcgctaagacggctcctggaaagaagagaccggtagagccgtcaccacagcgttcccccgactcctccacgggcatcggcaagaaaggccagcagcccgccagaaagagactcaatttcggtcagactggcgactcagagtcagtccccgaccctcaacctatcggagaacctccagcagcgccctctagtgtgggatctggtacaatggctgcaggcggtggcgcaccaatggcagacaataacgaaggtgccgacggagtgggtagttcctcgggaaattggcattgcgattccacacggctgggcgacagagtcatcaccaccagcacccggacctgggctttgcccacctacaacaaccacctctacaagcaaatctccagtcagtcagcaggtagcaccaacgacaacgtctacttcggctacagcaccccctgggggtattttgacttcaacagattccactgtcacttctcaccacgtgactggcagcggctcatcaacaacaactggggattccggcccaagaagctcaacttcaagctgttcaacatccaggtcaaggaggtcacaacgaatgacggcgtcacgaccatcgccaataaccttaccagcacggttcaggtcttttcggactcggaataccagctgccctacgtcctcggctccgcacaccagggctgcctgcctccgttcccggcggacgtcttcatgattccccagtacggctacctgactctgaacaatggcagccaatcggtgggtcgttcctctttctactgcctggaatatttcccttctcaaatgctgagaacgggcaacaacttcaccttcagctacaccttcgaggacgttcccttccacagcagctacgcacacagccagagcctggaccggctgatgaatcctcttatcgaccagtacctgtattacctggccagaacacagagcaacgcaggaggcacagctggcaatcgggaactgcagttttatcagggcgggcctaccaccatggccgaacaagccaaaaactggctgcctggaccttgcttccggcaacgaagagtctccaagacgctggatcaaaacaacaacagcaactttgcttggactggtgccaccaaataccatctaaatggaagaaattcattggttaatcccggtgtcgccatggcaacccacaaggacgacgaggaacgcttcttcccttcgagcggagtcctgatttttggaaaaactggagcagctaataagactacactggaaaatgtgttaatgacaaatgaagaggaaattcgtcctaccaacccggtagccaccgaggaatacgggactgttagcagcaacctgcaggcggctaacactgcagcccagacacaagttgtcaacaaccagggagccttacctggtatggtctggcagaaccgggacgtgtacctgcagggtcccatctgggccaagattcctcacacggacggcaactttcacccgtctccgctgatgggcggctttggactgaagcatccgcctcctcagatcctgatcaaaaacactcctgttcctgctaatcccccggaggtgtttacgcctgccaagtttgcttctttcatcacacagtacagcaccggccaggtcagcgtggagatcgagtgggagctgcagaaggagaacagcaagcgctggaacccagagattcagtatacctccaattttgacaaacagactggtgtggactttgccgttgacagccagggtgtttattctgagcctcgccccattggtactcgttacctcacccgtaatctgtaa

SEQ ID NO: 481 - protein, 737 aa, Artificial Sequence
  source: /note="Description of Artificial Sequence: Synthetic polypeptide"
MAADGYLPDWLEDNLSEGIREWWDLKPGAPKPKANQQKQDDGRGLVLPGYKYLGPFNGLDKGEPVNAADAAALEHDKAYDQQLKAGDNPYLRYNHADAEFQERLQEDTSFGGNLGRAVFQAKKRVLEPLGLVEEGAKTAPGKKRPVEPSPQRSPDSSTGIGKKGQQPARKRLNFGQTGDSESVPDPQPIGEPPAAPSSVGSGTMAAGGGAPMADNNEGADGVGSSSGNWHCDSTRLGDRVITTSTRTWALPTYNNHLYKQISSQSAGSTNDNVYFGYSTPWGYFDFNRFHCHFSPRDWQRLINNNWGFRPKKLNFKLFNIQVKEVTTNDGVTTIANNLTSTVQVFSDSEYQLPYVLGSAHQGCLPPFPADVFMIPQYGYLTLNNGSQSVGRSSFYCLEYFPSQMLRTGNNFTFSYTFEDVPFHSSYAHSQSLDRLMNPLIDQYLYYLARTQSNAGGTAGNRELQFYQGGPTTMAEQAKNWLPGPCFRQRRVSKTLDQNNNSNFAWTGATKYHLNGRNSLVNPGVAMATHKDDEERFFPSSGVLIFGKTGAANKTTLENVLMTNEEEIRPTNPVATEEYGTVSSNLQAANTAAQTQVVNNQGALPGMVWQNRDVYLQGPIWAKIPHTDGNFHPSPLMGGFGLKHPPPQILIKNTPVPANPPEVFTPAKFASFITQYSTGQVSVEIEWELQKENSKRWNPEIQYTSNFDKQTGVDFAVDSQGVYSEPRPIGTRYLTRNL

SEQ ID NO: 482 - DNA, 2208 bp, Artificial Sequence
  source: /note="Description of Artificial Sequence: Synthetic polynucleotide"
atggctgccgatggttatcttccagattggctcgaggacactctctctgaaggaataagacagtggtggaagctcaaacctggcccaccaccaccaaagcccgcagagcggcataaggacgacagcaggggtcttgtgcttcctgggtacaagtacctcggacccttcaacggactcgacaagggggagccggtcaacgaggcagacgccgcggccctcgagcacgacaaggcctacgaccggcagctcgacagcggagacaacccgtacctcaagtacaaccacgccgacgcggagtttcaggagcgtcttaaagaagatacgtcttttgggggcaacctcggacgagcagtcttccaggcgaaaaagagggttcttgaacctctgggcctggttgaggaacctgttaagacggctccgggaaaaaagaggccggtagagcactctcctgcggagccagactcctcctcgggaaccggaaaagcgggccagcagcctgcaagaaaaagattgaattttggtcagactggagacgcagactccgtacctgacccccagcctctcggacagccaccagcagccccctctggtttgggatctactacaatggctacaggcagtggcgcaccaatggcagacaataacgagggtgccgatggagtgggtaattcttcaggaaattggcattgcgattcccaatggctgggcgacagagtcatcaccaccagcacccgaacctgggcccagcccacctacaacaaccacctctacaagcaaatctcaagccaatcaggagcctcaaacgacaaccactactttggctacagcaccccttgggggtattttgacttcaacagattccactgccacttttcaccacgtgactggcaaagactcatcaacaacaactggggattccgacccaagagactcaacttcaagctctttaacattcaagtcaaagaggtcacgcagaatgacggtacgacgacgattgccaataaccttaccagcacggttcaggtgtttactgactcggagtaccagctcccgtacgtcctcgggtcggcgcatcaaggatgcctcccgccgtttccagcggacgtcttcatggtcccacagtatggatacctcaccctgaacaacgggagtcaggcggtaggacgctcttccttttactgcctggagtactttccttctcagatgcttcgtactggaaacaactttcagttcagctacacctttgaagacgttcctttccacagcagctacgctcacagccagagtctggatcggctgatgaatcctctgatcgaccagtacctgtattatctgaacaaaacacaatcaaatagtggagctcttcagcagtctcggctactgtttagtcaagctggacccaccagcatgtctcttcaagctaaaaactggctacctggaccttgctacagacagcagcgtctgtcaaagcaggcaaacgacaacaacaacagcaactttccctggactgcggctacaaagtaccacctaaatggccgggactcgttggttaatccaggaccagctatggccagtcacaaagacgatgaagaaaagtttttccccatgcatggaaccctgatatttggtaaacaaggaacaaatgctaacgacgcggatttggacaatgtcatgattacagatgaagaagaaatccgcaccaccaatcccgtggctacggagcagtacggatatgtgtcaaataatttgcaaaactcaaatactggtccaactactggaactgtcaatcaccgaggagcgttacctggcatggtgtggcaggatcgagacgtgtacctgcagggacccatttgggccaagattcctcacaccgatggacactttcatccttctccactgatgggaggttttgggctcaaacacccgcctcctcagatcatgatcaaaaacactcccgttccagccaatcctcccacaaacttcagttctgccaagtttgcttctttcatcacacagtattccacggggcaggtcagcgtggagatcgagtgggagctgcagaaagagaacagcaaacgctggaatcccgaaattcagtacacttccaactacaacaaatctgttaatgtggactttactgtggacactaatggcgtgtattcagagcctcgccccattggcaccagatacctgactcgtaatctgtaa

SEQ ID NO: 483 - protein, 735 aa, Artificial Sequence
  source: /note="Description of Artificial Sequence: Synthetic polypeptide"
MAADGYLPDWLEDTLSEGIRQWWKLKPGPPPPKPAERHKDDSRGLVLPGYKYLGPFNGLDKGEPVNEADAAALEHDKAYDRQLDSGDNPYLKYNHADAEFQERLKEDTSFGGNLGRAVFQAKKRVLEPLGLVEEPVKTAPGKKRPVEHSPAEPDSSSGTGKAGQQPARKRLNFGQTGDADSVPDPQPLGQPPAAPSGLGSTTMATGSGAPMADNNEGADGVGNSSGNWHCDSQWLGDRVITTSTRTWAQPTYNNHLYKQISSQSGASNDNHYFGYSTPWGYFDFNRFHCHFSPRDWQRLINNNWGFRPKRLNFKLFNIQVKEVTQNDGTTTIANNLTSTVQVFTDSEYQLPYVLGSAHQGCLPPFPADVFMVPQYGYLTLNNGSQAVGRSSFYCLEYFPSQMLRTGNNFQFSYTFEDVPFHSSYAHSQSLDRLMNPLIDQYLYYLNKTQSNSGALQQSRLLFSQAGPTSMSLQAKNWLPGPCYRQQRLSKQANDNNNSNFPWTAATKYHLNGRDSLVNPGPAMASHKDDEEKFFPMHGTLIFGKQGTNANDADLDNVMITDEEEIRTTNPVATEQYGYVSNNLQNSNTGPTTGTVNHRGALPGMVWQDRDVYLQGPIWAKIPHTDGHFHPSPLMGGFGLKHPPPQIMIKNTPVPANPPTNFSSAKFASFITQYSTGQVSVEIEWELQKENSKRWNPEIQYTSNYNKSVNVDFTVDTNGVYSEPRPIGTRYLTRNL

SEQ ID NO: 484 - DNA, 2217 bp, Artificial Sequence
  source: /note="Description of Artificial Sequence: Synthetic polynucleotide"
atggctgccgatggttatcttccagattggctcgaggacaacctctctgagggcattcgcgagtggtgggcgctgaaacctggagccccgaagcccaaagccaaccagcaaaagcaggacgacggccggggtctggtgcttcctggctacaagtacctcggacccttcaacggactcgacaagggggagcccgtcaacgcggcggacgcagcggccctcgagcacgacaaggcctacgaccagcagctgcaggcgggtgacaatccgtacctgcggtataatcacgccgacgccgagtttcaggagcgtctgcaagaagatacgtcttttgggggcaacctcgggcgagcagtcttccaggccaagaagcgggttctcgaacctctcggtctggttgaggaaggcgctaagacggctcctggaaagaagagaccggtagagccgtcaccacagcgttcccccgactcctccacgggcatcggcaagaaaggccagcagcccgccagaaagagactcaatttcggtcagactggcgactcagagtcagtccccgaccctcaacctatcggagaacctccagcagcgccctctagtgtgggatctggtacaatggctgcaggcggtggcgcgccaatggcagacaataacgaaggtgccgacggagtgggtagttcctcgggaaattggcattgcgattccacatggctgggcgacagagtcatcaccaccagcacccgaacctgggccctgcccacctacaacaaccacctctacaagcaaacctccaacgggacctcgggaggcagcaccaacgacaacacctactttggctacagcaccccctgggggtattttgactttaacagattccactgccacttctcaccacgtgactggcagcgactcatcaacaacaactggggattccggcccaagagactcagcttcaagctcttcaacatccaggtcaaagaggtcacgcagaatgaaggcaccaagaccatcgccaataacctcaccagcaccatccaggtgtttacggactcggaataccagctgccgtacgtcctcggctctgcccaccagggctgcctgcctccgttcccggcggacgtcttcatgattcctcagtacggctacctgactctcaacaacggtagtcaggccgtgggacgttcctccttctactgcctggagtacttcccctctcagatgctgagaacgggcaacaacttttccttcagctacactttcgaggacgtgcctttccacagcagctacgcgcacagccagagtttggacaggctgatgaatcctctcatcgaccagtacctgtactacctgtcaagaacccagtctacgggaggcacagcgggaacccagcagttgctgttttctcaggccgggcctagcaacatgtcggctcaggccagaaactggctgcctggaccctgctacagacagcagcgcgtctccacgacactgtcgcaaaacaacaacagcaactttgcctggactggtgccaccaagtatcatctgaacggcagagactctctggtgaatccgggcgtcgccatggcaaccaacaaggacgacgaggaccgcttcttcccatccagcggcatcctcatgtttggcaagcagggagctggaaaagacaacgtggactatagcaacgtgatgctaaccagcgaggaagaaatcaagaccaccaaccccgtggccacagaacagtatggcgtggtggctgataacctacagcagcaaaacaccgctcctattgtgggggccgtcaacagccagggagccttacctggcatggtctggcagaaccgggacgtgtacctgcagggtcctatttgggccaagattcctcacacagatggcaactttcacccgtctcctttaatgggcggctttggacttaaacatccgcctcctcagatcctcatcaaaaacactcctgttcctgcggatcctccaacagcgttcaaccaggccaagctgaattctttcatcacgcagtacagcaccggacaagtcagcgcggagatcgagtgggagctgcagaaggagaacagcaagcgctggaacccagagattcagtatacttccaactactacaaatctacaaatgtggactttgctgttaatactgagggtgtttactctgagcctcgccccattggcactcgttacctcacccgtaatctgtaa

SEQ ID NO: 485 - protein, 738 aa, Artificial Sequence
  source: /note="Description of Artificial Sequence: Synthetic polypeptide"
MAADGYLPDWLEDNLSEGIREWWALKPGAPKPKANQQKQDDGRGLVLPGYKYLGPFNGLDKGEPVNAADAAALEHDKAYDQQLQAGDNPYLRYNHADAEFQERLQEDTSFGGNLGRAVFQAKKRVLEPLGLVEEGAKTAPGKKRPVEPSPQRSPDSSTGIGKKGQQPARKRLNFGQTGDSESVPDPQPIGEPPAAPSSVGSGTMAAGGGAPMADNNEGADGVGSSSGNWHCDSTWLGDRVITTSTRTWALPTYNNHLYKQTSNGTSGGSTNDNTYFGYSTPWGYFDFNRFHCHFSPRDWQRLINNNWGFRPKRLSFKLFNIQVKEVTQNEGTKTIANNLTSTIQVFTDSEYQLPYVLGSAHQGCLPPFPADVFMIPQYGYLTLNNGSQAVGRSSFYCLEYFPSQMLRTGNNFSFSYTFEDVPFHSSYAHSQSLDRLMNPLIDQYLYYLSRTQSTGGTAGTQQLLFSQAGPSNMSAQARNWLPGPCYRQQRVSTTLSQNNNSNFAWTGATKYHLNGRDSLVNPGVAMATNKDDEDRFFPSSGILMFGKQGAGKDNVDYSNVMLTSEEEIKTTNPVATEQYGVVADNLQQQNTAPIVGAVNSQGALPGMVWQNRDVYLQGPIWAKIPHTDGNFHPSPLMGGFGLKHPPPQILIKNTPVPADPPTAFNQAKLNSFITQYSTGQVSAEIEWELQKENSKRWNPEIQYTSNYYKSTNVDFAVNTEGVYSEPRPIGTRYLTRNL

SEQ ID NO: 486 - DNA, 2217 bp, Artificial Sequence
  source: /note="Description of Artificial Sequence: Synthetic polynucleotide"
atggctgctgacggttatcttccagattggctcgaggacaacctctctgagggcattcgcgagtggtgggacctgaaacctggagcccccaagcccaaggccaaccagcagaagcaggacgacggccggggtctggtgcttcctggctacaagtacctcggacccttcaacggactcgacaagggggagcccgtcaacgcggcggacgcagcggccctcgagcacgacaaggcctacgaccagcagctcaaagcgggtgacaatccgtacctgcggtataatcacgccgacgccgagtttcaggagcgtctgcaagaagatacgtcttttgggggcaacctcgggcgagcagtcttccaggccaagaagcgggttctcgaacctctcggtctggttgaggaagctgctaagacggctcctggaaagaagagaccggtagaaccgtcacctcagcgttcccccgactcctccacgggcatcggcaagaaaggccagcagcccgctagaaagagactgaactttgggcagactggcgactcagagtcagtccccgaccctcaaccaatcggagaacctccagcagcgccctctagtgtgggatctggtacaatggccgcaggcggtggcgcaccaatggcagacaataacgaaggtgccgacggagtgggtagttcctcgggaaattggcattgcgattccacatggctgggcgacagagtcatcaccaccagcacccgaacctgggccctgcccacctacaacaaccacctctacaagcaaatctccaacgggacctcgggaggcagcaccaacgacaacacctactttggctacagcaccccctgggggtattttgactttaacagattccactgccacttctcaccacgtgactggcagcgactcatcaacaacaactggggattccggcccaagagactcagcttcaagctcttcaacatccaggtcaaagaggtcacgcagaatgaaggcaccaagaccatcgccaataacctcaccagcaccatccaggtgtttacggactcggaataccagctgccgtacgtcctcggctctgcccaccagggctgcctgcctccgttcccggcggacgtcttcatgattcctcagtacggctacctgactctcaacaacggtagtcaggccgtgggacgttcctccttctactgcctggagtacttcccctctcagatgctgagaacgggcaacaacttttccttcagctacactttcgaggacgtgcctttccacagcagctacgcgcacagccagagtttggacaggctgatgaatcctctcatcgaccagtacctgtactacctgtcaagaacccagtctacgggaggcacagcgggaacccagcagctgctgttttctcaggccgggcctagcaacatgtcggctcaggccagaaactggctgcctggaccctgctacagacagcagcgcgtctccacgacactgtcgcaaaacaacaacagcaactttgcctggactggtgccaccaagtatcatctgaacggcagagactctctggtgaatccgggcgtcgccatggcaaccaacaaggacgacgaggaccgcttcttcccatccagcggcatcctcatgtttggcaagcagggagctggaaaagacaacgtggactatagcaacgtgatgctaaccagcgaggaagaaatcaagaccaccaaccccgtggccacagaacagtatggcgtggtggctgataacctacagcagcaaaacaccgctcctattgtgggggccgtcaacagccagggagccttacctggcatggtctggcagaaccgggacgtgtacctgcagggtcctatttgggccaagattcctcacacagatggcaactttcacccgtctcctttaatgggcggctttggacttaaacatccgcctcctcagatcctcatcaaaagcactcctgttcctgcggatcctccaacagcgttcaaccaggccaagctgaattctttcatcacgcagtacagcaccggacaagtcagcgtggagatcgagtgggagctgcagaaggagaacagcaagtgctggaacccagagattcagtatacttccaactactacaaatctacaaatgtggactttgctgttaatactgagggtgtttactctgagcctcgccccattggcactcgttacctcacccgtaatctgtaa

SEQ ID NO: 487 - protein, 738 aa, Artificial Sequence
  source: /note="Description of Artificial Sequence: Synthetic polypeptide"
MAADGYLPDWLEDNLSEGIREWWDLKPGAPKPKANQQKQDDGRGLVLPGYKYLGPFNGLDKGEPVNAADAAALEHDKAYDQQLKAGDNPYLRYNHADAEFQERLQEDTSFGGNLGRAVFQAKKRVLEPLGLVEEAAKTAPGKKRPVEPSPQRSPDSSTGIGKKGQQPARKRLNFGQTGDSESVPDPQPIGEPPAAPSSVGSGTMAAGGGAPMADNNEGADGVGSSSGNWHCDSTWLGDRVITTSTRTWALPTYNNHLYKQISNGTSGGSTNDNTYFGYSTPWGYFDFNRFHCHFSPRDWQRLINNNWGFRPKRLSFKLFNIQVKEVTQNEGTKTIANNLTSTIQVFTDSEYQLPYVLGSAHQGCLPPFPADVFMIPQYGYLTLNNGSQAVGRSSFYCLEYFPSQMLRTGNNFSFSYTFEDVPFHSSYAHSQSLDRLMNPLIDQYLYYLSRTQSTGGTAGTQQLLFSQAGPSNMSAQARNWLPGPCYRQQRVSTTLSQNNNSNFAWTGATKYHLNGRDSLVNPGVAMATNKDDEDRFFPSSGILMFGKQGAGKDNVDYSNVMLTSEEEIKTTNPVATEQYGVVADNLQQQNTAPIVGAVNSQGALPGMVWQNRDVYLQGPIWAKIPHTDGNFHPSPLMGGFGLKHPPPQILIKSTPVPADPPTAFNQAKLNSFITQYSTGQVSVEIEWELQKENSKCWNPEIQYTSNYYKSTNVDFAVNTEGVYSEPRPIGTRYLTRNL

SEQ ID NO: 488 - protein, 738 aa, Artificial Sequence
  source: /note="Description of Artificial Sequence: Synthetic polypeptide"
MAADGYLPDWLEDNLSEGIREWWDLKPGAPKPKANQQKQDDGRGLVLPGYKYLGPFNGLDKGEPVNAADAAALEHDKAYDQQLKAGDNPYLRYNHADAEFQERLQEDTSFGGNLGRAVFQAKKRVLEPLGLVEEAAKTAPGKKRPVEPSPQRSPDSSTGIGKKGQQPARKRLNFGQTGDSESVPDPQPIGEPPAAPSSVGSGTMAAGGGAPMADNNEGADGVGSSSGNWHCDSTWLGDRVITTSTRTWALPTYNNHLYKQISNGTSGGSTNDNTYFGYSTPWGYFDFNRFHCHFSPRDWQRLINNNWGFRPKRLSFKLFNIQVKEVTQNEGTKTIANNLTSTIQVFTDSEYQLPYVLGSAHQGCLPPFPADVFMIPQYGYLTLNNGSQAVGRSSFYCLEYFPSQMLRTGNNFSFSYTFEDVPFHSSYAHSQSLDRLMNPLIDQYLYYLSRTQSTGGTAGTQQLLFSQAGPSNMSAQARNWLPGPCYRQQRVSTTLSQNNNSNFAWTGATKYHLNGRDSLVNPGVAMATNKDDEDRFFPSSGILMFGKQGAGKDNVDYSNVMLTSEEEIKTTNPVATEQYGVVADNLQQQNTAPIVGAVNSQGALPGMVWQNRDVYLQGPIWAKIPHTDGNFHPSPLMGGFGLKHPPPQILIKSTPVPADPPTAFNQAKLNSFITQYSTGQVSVEIEWELQKENSKRWNPEIQYTSNYYKSTNVDFAVNTEGVYSEPRPIGTRYLTRNL

SEQ ID NO: 489 - DNA, 2217 bp, Artificial Sequence
  source: /note="Description of Artificial Sequence: Synthetic polynucleotide"
atggctgctgacggttatcttccagattggctcgaggacaacctctctgagggcattcgcgagtggtgggacctgaaacctggagcccccaagcccaaggccaaccagcagaagcaggacgacggccggggtctggtgcttcctggctacaagtacctcggacccttcaacggactcgacaagggggagcccgtcaacgcggcggacgcagcggccctcgagcacgacaaggcctacgaccagcagctcaaagcgggtgacaatccgtacctgcggtataaccacgccgacgccgagtttcaggagcgtctgcaagaagatacgtcttttgggggcaacctcgggcgagcagtcttccaggccaagaagcgggttctcgaacctctcggtctggttgaggaagctgctaagacggctcctggaaagaagagaccggtagaaccgtcacctcagcgttcccccgactcctccacgggcatcggcaagaaaggccagcagcccgctagaaagagactgaactttgggcagactggcgactcagagtcagtccccgaccctcaaccaatcggagaaccaccagcaggcccctctggtctgggatctggtacaatggctgcaggcggtggcgcaccaatggctgacaataacgagggcgccgacggagtgggtaatgcctcaggaaattggcattgcgattccacatggctgggcgacagagtcatcaccaccagcacccgaacctgggctttgcccacctacaacaaccacctctacaagcaaatctccagtcagtcagcaggtagcaccaacgacaacgtctacttcggctacagcaccccctgggggtattttgacttcaacagattccactgtcacttctcaccacgtgactggcagcggctcatcaacaacaactggggattccggcccaagaagctcaacttcaagctgttcaacatccaggtcaaggaggtcacaacgaatgacggcgtcacgaccatcgccaataaccctaccagcacggttcaggtcttttcggactcggaataccagctgccctacgtcctcggctccgcacaccagggctgcctgcctccgttcccggcggacgtcttcatgattccccagtacggctacctgactctgaacaatggcagccaatcggtgggtcgttcctctttctactgcctggaatatttcccttctcaaatgctgagaacgggcaacaacttcaccttcagctacaccttcgaggacgttcccttccacagcagctacgcacacagccagagcctggaccggctgatgaatcctcttatcgaccagtacctgtattacctggccagaacacagagcaacgcaggaggcacagctggcaatcgggaactgcagttttatcagggcgggcctaccaccatggccgaacaagccaaaaactggctgcctggaccctgctacagacagcagcgcgtctccacgacactgtcgcaaaacaacaacagcaactttgcctggactggtgccaccaagtatcatctgaacggcagagactctctggtgaatccgggcgtcgccatggcaaccaacaaggacgacgaggaccgcttcttcccatccagcggcatcctcatgtttggcaagcagggagctggaaaagacaacgtggactatagcaacgtgatgctaaccagcgaggaagaaatcaagaccaccaaccccgtggccacagaacagtatggcgtggtggctgataacctacagcagcaaaacaccgctcctattgtgggggccgtcaacagccagggagccttacctggcatggtctggcagaaccgggacgtgtacctgcagggtcctatttgggccaagattcctcacacagatggcaactttcacccgtctcctttaatgggcggctttggacttaaacatccgcctcctcagatcctcatcaaaaacactcctgttcctgcggatcctccaacagcgttcaaccaggccaagctgaattctttcatcacgcagtacagcaccggacaagtcagcgtggagatcgagtgggagctgcagaaggagaacagcaagcgctggaacccagagattcagtatacttccaactactacaaatctacaaatgtggactttgctgttaatactgagggtgtttactctgagcctcgccccattggcactcgttacctcacccgtaatctgtaa

SEQ ID NO: 490 - protein, 738 aa, Artificial Sequence
  source: /note="Description of Artificial Sequence: Synthetic polypeptide"
MAADGYLPDWLEDNLSEGIREWWDLKPGAPKPKANQQKQDDGRGLVLPGYKYLGPFNGLDKGEPVNAADAAALEHDKAYDQQLKAGDNPYLRYNHADAEFQERLQEDTSFGGNLGRAVFQAKKRVLEPLGLVEEAAKTAPGKKRPVEPSPQRSPDSSTGIGKKGQQPARKRLNFGQTGDSESVPDPQPIGEPPAGPSGLGSGTMAAGGGAPMADNNEGADGVGNASGNWHCDSTWLGDRVITTSTRTWALPTYNNHLYKQISSQSAGSTNDNVYFGYSTPWGYFDFNRFHCHFSPRDWQRLINNNWGFRPKKLNFKLFNIQVKEVTTNDGVTTIANNPTSTVQVFSDSEYQLPYVLGSAHQGCLPPFPADVFMIPQYGYLTLNNGSQSVGRSSFYCLEYFPSQMLRTGNNFTFSYTFEDVPFHSSYAHSQSLDRLMNPLIDQYLYYLARTQSNAGGTAGNRELQFYQGGPTTMAEQAKNWLPGPCYRQQRVSTTLSQNNNSNFAWTGATKYHLNGRDSLVNPGVAMATNKDDEDRFFPSSGILMFGKQGAGKDNVDYSNVMLTSEEEIKTTNPVATEQYGVVADNLQQQNTAPIVGAVNSQGALPGMVWQNRDVYLQGPIWAKIPHTDGNFHPSPLMGGFGLKHPPPQILIKNTPVPADPPTAFNQAKLNSFITQYSTGQVSVEIEWELQKENSKRWNPEIQYTSNYYKSTNVDFAVNTEGVYSEPRPIGTRYLTRNL

SEQ ID NO: 491 - DNA, 2208 bp, Artificial Sequence
  source: /note="Description of Artificial Sequence: Synthetic polynucleotide"
atggctgccgatggttatcttccagattggctcgaggacaacctctctgagggcattcacgagtggtgggacccgaaacctggagccccgaaacccaaagccaaccagcaaaagcaggacgacggccggggtctggtgcttcctggctacaagtacctcggacccttcaacggactcgacaagggggagcccgtcaacgcggcggacgcagcggccctcgagcacgacaaggcctacgaccagcagctcaaagcgggtgacaatccgtacctgcggtataatcacgccgacgccgagtttcaggagcgtctgcaagaagatacgtcttttgggggcaacctcgggcgagcagtcttccaggccaagaagcgggttctcgaacctctcggtctggttgaggaaggcgctaagacggctcctggaaagaagagaccggtagagccgtcaccacagcgttcccccgactcctccacgggcatcggcaagaaaggccagcagcccgccagaaagagactcaatttcggtcagactggcgactcagagtcagtccccgaccctcaacctatcggagaacctccagcagcgccctctagtgtgggatctggtacaatggctgcaggcggtggcgcaccaatggcagacaataacgaaggtgccgacggagtgggtagttcctcgggaaattggcattgcgattccacatggctgggcgacagagtcatcaccaccagcacccgaacctgggccctgcccacccacaacaaccacctctacaagcaaatctccaacgggacctcgggaggcagcaccaacgacaacgtctacttcggctacagcaccccctgggggtattttgacttcaacagattccactgtcacttctcaccacgtgaccggcagcgactcatcaacaacaactggggattccggcccaagagactcagcttcaagctcttcaacatccaggtcaaagaggtcacgcagaatgaaggcaccaagaccatcgccaataacctcaccagcaccatccaggtgtttacggactcggaataccagctgccgtacgtcctcggctctgcccaccagggctgcctgcctccgttcccggcggacgtcttcatgattcctcagtacggctacctgactctcaacaacggtagtcaggccgtgggacgttcctccttctactgcctggagtacttcccctctcagatgctgagaacgggcaacaacttttccttcagctacactttcgaggacgtgcctttccacagcagctacgcgcacagccagagtttggacaggctgatgaatcctctcatcgaccagtacctgtactacctgtcaagaacccagtctacggaaggcacagcgggaacccagcagttgctgttttctcaggccgggcctagcaacatgtcggctcaggccagaaactggctgcctggaccctgctacagacagcagcgcgtctccacgacactgtcgcaaaacaacaacagcaactttgcctggactggtgccaccaagtatcatctgaacggcagagactctctggtgaatccgggcgtcgccatggcaacccacaaggacgacgaggaacgcttcttcccttcgagcggagtcctgatttttggaaaaactggagcagctaataagactacactggaaaatgtgttaatgacaaatgaagaggaaattcgtcctaccaacccggtagccaccgaggaatacgggactgttagcagcaacctgcaggcggctaacactgcagcccagacacaagttgtcaacaaccagggagccttacctggtatggtctggcagaaccgggacgtgtacctgcagggtcccatctgggccaagattcctcacacggacggcaactttcacccgtctccgctgatgggcggctttggactgaagcatcctcagatcctgatcaaaaacactcctgttcctgctaatcccccggaggtgtttacgcctgccaagtttgcttctttcatcacacagtacagcaccggccaggtcagcgtggagatcgagtgggagctgcagaaggagaacagcaagcgctggaacccagagattcagtatacctccaattttgacaaacagactggtgtggactttgccgttgacagccagggtgtttattctgagcctcgccccattggtactcgttacctcacccgtaatctgtaa

SEQ ID NO: 492 - protein, 735 aa, Artificial Sequence
  source: /note="Description of Artificial Sequence: Synthetic polypeptide"
MAADGYLPDWLEDNLSEGIHEWWDPKPGAPKPKANQQKQDDGRGLVLPGYKYLGPFNGLDKGEPVNAADAAALEHDKAYDQQLKAGDNPYLRYNHADAEFQERLQEDTSFGGNLGRAVFQAKKRVLEPLGLVEEGAKTAPGKKRPVEPSPQRSPDSSTGIGKKGQQPARKRLNFGQTGDSESVPDPQPIGEPPAAPSSVGSGTMAAGGGAPMADNNEGADGVGSSSGNWHCDSTWLGDRVITTSTRTWALPTHNNHLYKQISNGTSGGSTNDNVYFGYSTPWGYFDFNRFHCHFSPRDRQRLINNNWGFRPKRLSFKLFNIQVKEVTQNEGTKTIANNLTSTIQVFTDSEYQLPYVLGSAHQGCLPPFPADVFMIPQYGYLTLNNGSQAVGRSSFYCLEYFPSQMLRTGNNFSFSYTFEDVPFHSSYAHSQSLDRLMNPLIDQYLYYLSRTQSTEGTAGTQQLLFSQAGPSNMSAQARNWLPGPCYRQQRVSTTLSQNNNSNFAWTGATKYHLNGRDSLVNPGVAMATHKDDEERFFPSSGVLIFGKTGAANKTTLENVLMTNEEEIRPTNPVATEEYGTVSSNLQAANTAAQTQVVNNQGALPGMVWQNRDVYLQGPIWAKIPHTDGNFHPSPLMGGFGLKHPQILIKNTPVPANPPEVFTPAKFASFITQYSTGQVSVEIEWELQKENSKRWNPEIQYTSNFDKQTGVDFAVDSQGVYSEPRPIGTRYLTRNL

SEQ ID NO: 493 - protein, 738 aa, Artificial Sequence
  source: /note="Description of Artificial Sequence: Synthetic polypeptide"
MAADGYLPDWLEDNLSEGIREWWDLKPGAPKPKANQQKQDDGRGLVLPGYKYLGPFNGLDKGEPVNAADAAALEHDKAYDQQLKAGDNPYLRYNHADAEFQERLQEDTSFGGNLGRAVFQAKKRVLEPLGLVEEGAKTAPGKKRPVEPSPQRSPDSSTGIGKKGQQPARKRLNFGQTGDSESVPDPQPIGEPPAAPSSVGSGTMAAGGGAPMADNNEGADGVGSSSGNWHCDSTWLGDRVITTSTRTWALPTYNNHLYKQISNGTSGGSTNDNTYFGYSTPWGYFDFNRFHCHFSPRDWQRPINNNWGFRPKRLSFKLFNIQVKEVTQNEGTKTIANNLTSTIQVFTDSEYQLPYVLGSAHQGCLPPFPADVFMIPQYGYLTLNNGSQAVGRSSFYCLEYFPSQMLRTGNNFSFSYPFEDVPFHSSYAHSQSLDRLMNPLIDQYLYYLSRTQSTGGTAGTQQLLFSQAGPSNMSAQARNWLPGPCYRQQRVSTTLSQNNNSNFAWTGATKYHLNGRDSLVNPGVAMATNKDDEDRFFPSSGILMFGKQGAGKDNVDYSNVMLTSEEEIKTTNPVATEQYGVVADNLQQQDTAPIVGAVNSQGALPGMVWQNRDVYLQGPIWAKIPHTDGNFHPSPLMGGFGLKHPPPQVLIKNTPVPADPPTAFNQAKLNSFITQYSTGQVSVEIEWELQKENSKRWNPEIQYTSNYYKSTNVDFAVNTEGVYSEPRPIGTRYLTRNL

SEQ ID NO: 494 - DNA, 2217 bp, Artificial Sequence
  source: /note="Description of Artificial Sequence: Synthetic polynucleotide"
atggctgccgatggttatcttccagattggctcgaggacaacctctctgagggcattcgcgagtggtgggacctgaaacctggagccccgaaacccaaggccaaccagcaaaagcaggacgacggccggggtctggtgcttcctggctacaagtacctcggacccttcaacggactcgacaagggggagcccgtcaacgcggcggacgcagcggccctcgagcacgacaaggcctacgaccagcagctcaaagcgggtgacaatccgtacctgcggtataatcacgccgacgccgagtttcaggagcgtctgcaagaagatacgtcttttgggggcaacctcgggcgagcagtcttccaggccaagaagcgggttctcgaacctctcggtctggttgaggaaggcgctaagacggctcctggaaagaagagaccggtagagccgtcaccacagcgttcccccgactcctccacgggcatcggcaagaaaggccagcagcccgccagaaagagactcaatttcggtcagactggcgactcagagtcagtccccgaccctcaacctatcggagaacctccagcagcgccctctagtgtgggatctggtacaatggctgcaggcggtggcgcaccaatggcagacaataacgaaggtgccgacggagtgggtagttcctcgggaaattggcattgcgattccacatggctgggcgacagagtcatcaccaccagcacccgaacctgggccctgcccacctacaacaaccacctctacaagcaaatctccaacgggacctcgggaggcagcaccaacgacaacacctactttggctacagcaccccctgggggtattttgactttaacagattccactgccacttctcaccacgtgactggcagcgacccatcaacaacaactggggattccggcccaagagactcagcttcaagctcttcaacatccaggtcaaagaggtcacgcagaatgaaggcaccaagaccatcgccaataacctcaccagcaccatccaggtgtttacggactcggaataccagctgccgtacgtcctcggctctgcccaccagggctgcctgcctccgttcccggcggacgtcttcatgattcctcagtacggctacctgactctcaacaacggtagtcaggccgtgggacgttcctccttctactgcctggagtacttcccctctcagatgctgagaacgggcaacaacttttccttcagctaccctttcgaggacgtgcctttccacagcagctacgcgcacagccagagtttggacaggctgatgaatcctctcatcgaccagtacctgtactacctgtcaagaacccagtctacgggaggcacagcgggaacccagcagttgctgttttctcaggccgggcctagcaacatgtcggctcaggccagaaactggctgcctggaccctgctacagacagcagcgcgtctccacgacactgtcgcaaaacaacaacagcaactttgcctggactggtgccaccaagtatcatctgaacggcagagactctctggtgaatccgggcgtcgccatggcaaccaacaaggacgacgaggaccgcttcttcccatccagcggcatcctcatgtttggcaagcagggagctggaaaagacaacgtggactatagcaacgtgatgctaaccagcgaggaagaaatcaagaccaccaaccccgtggccacagaacagtatggcgtggtggctgataacctacagcagcaagacaccgctcctattgtgggggccgtcaacagccagggagccttacctggcatggtctggcagaaccgggacgtgtacctgcagggtcctatttgggccaagattcctcacacagatggcaactttcacccgtctcctttaatgggcggctttggacttaaacatccgcctcctcaggtcctcatcaaaaacactcctgttcctgcggatcctccaacagcgttcaaccaggccaagctgaattctttcatcacgcagtacagcaccggacaagtcagcgtggagatcgagtgggagctgcagaaggagaacagcaagcgctggaacccagagattcagtatacttccaactactacaaatctacaaatgtggactttgctgttaatactgagggtgtttactctgagcctcgccccattggcactcgttacctcacccgtaatctgtaa

SEQ ID NO: 495 - DNA, 2214 bp, Artificial Sequence
  source: /note="Description of Artificial Sequence: Synthetic polynucleotide"
atggctgctgacggttatcttccagattggctcgaggacaacctctctgagggcattcgcgagtggtgggacctgaaacctggagcccccaagcccaaggccaaccagcagaagcaggacgacggccggggtctggtgcttcctggctacaagtacctcggacccttcaacggactcgacaagggggagcccgtcaacgcggcggacgcagcggccctcgagcacgacaaggcctacgaccagcagctcaaagcgggtgacaatccgtacctgcggtataaccacgccgacgccgagttccaggagcgtctgcaagaagatacgtcttttgggggcaacctcgggcgagcagtcttccaggccaagaagcgggttctcgaacctctcggtctggctgaggaagctgctaagacggctcctggaaagaagagaccggtagaaccgtcacctcagcgttcccccgactcctccacgggcatcggcaagaaaggccagcagcccgctagaaagagactgaactttgggcagactggcgactcagagtcagtccccgaccctcaaccaatcggagagccaccagcaggcccctctggtctgggatctggtacaatggctgcaggcggtggcgcaccaatggctgacaataacaagggcgccgacggagtgggtaatgcctcaggaaattggcattgcgattccacatggctgggcgacagagtcatcaccaccagcacccgaacctgggctttgcccacctacaacaaccacctctacaagcaaatctccagtcagtcagcaggtagcaccaacgacaacgtctacttcggctacagcaccccctgggggtattttgacttcaacagattccactgtcacttctcaccacgtgactggcagcggctcatcaacaacaactggggattccggcccaagaagctcaacttcaagctgttcaacatccaggtcaaggaggtcacaacgggtgacggcgtcacgaccatcgccaataaccttaccagcacggttcaggtcttttcggactcggaataccagctgccctacgtcctcggctccgcacaccagggctgcctgcctccgttcccggcggacgtcttcatgattccccagtacggctacctgactctgaacaatgacagccaatcggtgggtcgttcctctttctactgcctggaatatttcccttctcaaatgctgagaacgggcaacaacttcaccttcagctacaccttcgaggacgttcccttccacagcagctacgcacacagccagagcctggaccggctgatgaatcctcttatcgaccagtacctgtattacctggccagaacacagagcaacgcaggaggcacagctggcaatcgggaactgcagttttatcagggcgggcctaccaccatggccgaacaagccaaaaactggctgcctggaccttgcttccggcaacaaagagtctccaagacgctggatcaaaacaacaacagcaactttgcttggactggtgccaccaaataccatctaaatggaagaaattcattggttaatcccggtgtcgccatggcaacccacaaggacgacgaggaacgcttcttcccttcgagcggagtcctgatttttggaaaaactggagcagctaataagactacactggaaaatgtgttaatgacaaatgaagaggaaattcgtcctaccaacccggtagccaccgaggaatacgggactgttagcagcaacctgcaggcggctaacactgcagcccagacacaagttgtcaacaaccagggagccttacctggtatggtctggcagaaccgggacgtgtacctgcagggtcccatctgggccaagattcctcacacggacggcaactttcacccgtctccgctgatgggcggctttggactgaagcatccgcctcctcagatcctgatcaaaaacactcctgttcctgctaatcccccggaggtgtttacgcctgccaagtttgcttctttcatcacacagtacagcaccggccaggtcagcgtggagatcgagtgggagctgcagaaggagaacagcaagcgctggaacccagagattcagtatacctccaattttgacaaacagactggtgtggactttgccgttgacagccagggtgtttattctgagcctcgccccattggtactcgttacctcacccgtaatctgtaa

SEQ ID NO: 496 - protein, 737 aa, Artificial Sequence
  source: /note="Description of Artificial Sequence: Synthetic polypeptide"
MAADGYLPDWLEDNLSEGIREWWDLKPGAPKPKANQQKQDDGRGLVLPGYKYLGPFNGLDKGEPVNAADAAALEHDKAYDQQLKAGDNPYLRYNHADAEFQERLQEDTSFGGNLGRAVFQAKKRVLEPLGLAEEAAKTAPGKKRPVEPSPQRSPDSSTGIGKKGQQPARKRLNFGQTGDSESVPDPQPIGEPPAGPSGLGSGTMAAGGGAPMADNNKGADGVGNASGNWHCDSTWLGDRVITTSTRTWALPTYNNHLYKQISSQSAGSTNDNVYFGYSTPWGYFDFNRFHCHFSPRDWQRLINNNWGFRPKKLNFKLFNIQVKEVTTGDGVTTIANNLTSTVQVFSDSEYQLPYVLGSAHQGCLPPFPADVFMIPQYGYLTLNNDSQSVGRSSFYCLEYFPSQMLRTGNNFTFSYTFEDVPFHSSYAHSQSLDRLMNPLIDQYLYYLARTQSNAGGTAGNRELQFYQGGPTTMAEQAKNWLPGPCFRQQRVSKTLDQNNNSNFAWTGATKYHLNGRNSLVNPGVAMATHKDDEERFFPSSGVLIFGKTGAANKTTLENVLMTNEEEIRPTNPVATEEYGTVSSNLQAANTAAQTQVVNNQGALPGMVWQNRDVYLQGPIWAKIPHTDGNFHPSPLMGGFGLKHPPPQILIKNTPVPANPPEVFTPAKFASFITQYSTGQVSVEIEWELQKENSKRWNPEIQYTSNFDKQTGVDFAVDSQGVYSEPRPIGTRYLTRNL

SEQ ID NO: 497 - DNA, 2217 bp, Artificial Sequence
  source: /note="Description of Artificial Sequence: Synthetic polynucleotide"
atggctgccgatggttatcttccagattggctcgaggacaacctctctgagggcattcgcgagtggtgggacctgaaacctggagccccgaaacccaaagccaaccagcaaaagcaggacgacggccggggtctggtgcttcctggctacaagtacctcggacccttcaacggactcgacaagggggagcccgtcaacgcggcggacgcagcggccctcgagcacgacaaggcctacgaccagcagctcaaagcgggtgacaatccgtacctgcggtataatcacgccgacgccgagtttcaggagcgtctgcaagaagatacgtcttttgggggcaacctcgggcgagcagtcttccaggccaagaagcgggttctcgaacctctcggtctggttgaggaaggcgctaagacggctcctggaaagaagagaccggtagagccgtcaccacagcgttcccccgactcctccacgggcatcggcaagaaaggccagcagcccgccagaaagagactcaatttcggtcagactggcgactcagagtcagtccccgaccctcaacctatcggagaacctccagcagcgccctctagtgtgggatctggtacaatggctgcaggcggtggcgcaccaatggcagacaataacgaaggtgccgacggagtgggtagttcctcgggaaattggcattgcgattccacatggctgggcgacagagtcatcaccaccagcacccgaacctgggccctgcccacctacaacaaccacctctacaagcaaatctccaacgggacctcgggaggcagcaccaacgacaacacctactttggctacagcaccccctgggggtattttgactttaacagattccactgccacttctcaccacgtgactggcagcgactcatcaacaacaactggggattccggcccaagagactcagcttcaagctcttcaacatccaggtcaaagaggtcacgcagaatgaaggcaccaagaccatcgccaataacctcaccagcaccatccaggtgtttacggactcggaataccagctgccgtacgtcctcggctctgcccaccagggctgcctgcctccgttcccggcggacgtcttcatgattcctcagtacggctacctgactctcaacaacggtagtcaggccgtgggacgttcctccttctactgcctggagtacttcccctctcagatgctgagaacgggcaacaacttttccttcagctacactttcgaggacgtgcctttccacagcagctacgcgcacagccagagtttggacaggctgatgaatcctctcatcgaccagtacctgtactacctgtcaagaacccagtctacgggaggcacagcgggaacccagcagttgctgttttctcaggccgggcctagcaacatgtcggctcaggccagaaactggctgcctggaccctgctacagacagcagcgcgtctccacgacactgtcgcaaaacaacaacagcaactttgcctggactggtgccaccaagtatcatctgaacggcagagactctctggtgaatccgggcgtcgccatggcaaccaacaaggacgacgaggaccgcttcttcccatccagcggcatcctcatgtttggcaagcagggagctggaaaagacaacgtggactatagcaacgtgatgctaaccagcgaggaagaaatcaagaccaccaaccccgtggccacagaacagtatggcgtggtggctgataacctacagcagcaaaacaccgctcctattgtgggggccgtcaacagccagggagccttacctggcatggtctggcagaaccgggacgtgtacctgcagggtcctatttgggccaagattcctcacacagatggcaactttcacccgtctcctttaatgggcggctttggacttaaacatccgcctcctcagatcctcatcaaaaacactcctgttcctgcggatcctccaacagcgttcaaccaggccaagctgaattctttcatcacgcagtacagcaccggacaagtcagcgtggagatcgtgtgggagctgcagaaggagaacagcaagcgcaggaacccagagattcagtatacttccaactactacaaatctacaaatgtggactttgctgttaatactgagggtgtttactctgagcctcgccccattggcactcgttacctcacccgtaatctgtaa

SEQ ID NO: 498 - protein, 738 aa, Artificial Sequence
  source: /note="Description of Artificial Sequence: Synthetic polypeptide"
MAADGYLPDWLEDNLSEGIREWWDLKPGAPKPKANQQKQDDGRGLVLPGYKYLGPFNGLDKGEPVNAADAAALEHDKAYDQQLKAGDNPYLRYNHADAEFQERLQEDTSFGGNLGRAVFQAKKRVLEPLGLVEEGAKTAPGKKRPVEPSPQRSPDSSTGIGKKGQQPARKRLNFGQTGDSESVPDPQPIGEPPAAPSSVGSGTMAAGGGAPMADNNEGADGVGSSSGNWHCDSTWLGDRVITTSTRTWALPTYNNHLYKQISNGTSGGSTNDNTYFGYSTPWGYFDFNRFHCHFSPRDWQRLINNNWGFRPKRLSFKLFNIQVKEVTQNEGTKTIANNLTSTIQVFTDSEYQLPYVLGSAHQGCLPPFPADVFMIPQYGYLTLNNGSQAVGRSSFYCLEYFPSQMLRTGNNFSFSYTFEDVPFHSSYAHSQSLDRLMNPLIDQYLYYLSRTQSTGGTAGTQQLLFSQAGPSNMSAQARNWLPGPCYRQQRVSTTLSQNNNSNFAWTGATKYHLNGRDSLVNPGVAMATNKDDEDRFFPSSGILMFGKQGAGKDNVDYSNVMLTSEEEIKTTNPVATEQYGVVADNLQQQNTAPIVGAVNSQGALPGMVWQNRDVYLQGPIWAKIPHTDGNFHPSPLMGGFGLKHPPPQILIKNTPVPADPPTAFNQAKLNSFITQYSTGQVSVEIVWELQKENSKRRNPEIQYTSNYYKSTNVDFAVNTEGVYSEPRPIGTRYLTRNL

SEQ ID NO: 499 - protein, 738 aa, Artificial Sequence
  source: /note="Description of Artificial Sequence: Synthetic polypeptide"
MAADGYLPDWLEDNLSEGIREWWDLKPGAPKPKANQQKQDDGRGLVLPGYKYLGPFNGLDKGEPVNAADAAALEHDKAYDQQLKAGDNPYLRYNHADAEFQERLQEDTSFGGNLGRAVFQAKKRVLEPLGLVEEGAKTAPGKKRPVEPSPQRSPDSSTGIGKKGQQPARKRLNFGQTGDSESVPDPQPIGEPPAAPSSVGSGTMAAGGGAPMADNNEGADGVGSSSGNWHCDSTWLGDRVITTSTRTWALPTYNNHLYKQISNGTSGGSTNDNTYFGYSTPWGYFDFNRFHCHFSPRDWQRLINNNWGFRPKRLSFKLFNIQVKEVTQNEGTKTIANNLTSTIQVFTDSEYQLPYVLGSAHQGCLPPFPADVFMIPQYGYLTLNNGSQAVGRSSFYCLEYFPSQMLRTGNNFSFSYTFEDVPFHSSYAHSQSLDRLMNPLIDQYLYYLSRTQSTGGTAGTQQLLFSQAGPSNMSAQARNWLPGPCYRQQRVSTTLSQNNNSNFAWTGATKYHLNGRDSLVNPGVAMATNKDDEDRFFPSSGILMFGKQGAGKDNVDYSNVMLTSEEEIKTTNPVATEQYGVVADNLQQQNTAPIVGAVNSQGALPGMVWQNRDVYLQGPIWAKIPHTDGNFHPSPLMGGFGLKHPPPQILIKNTPVPADPPTAFNQAKLNSFITQYSTGQVSVEIEWELQKENSKRWNPEIQYTSNYYKSTNVDFAVNTEGVYSEPRPIGTRYLTRNL

SEQ ID NO: 500 - protein, 738 aa, Artificial Sequence
  source: /note="Description of Artificial Sequence: Synthetic polypeptide"
MAADGYLPDWLEDNLSEGIREWWDLKPGAPKPKANQQKQDDGRGLVLPGYKYLGPFNGLDKGEPVNAADAAALEHDKAYDQQLKAGDNPYLRYNHADAEFQERLQEDTSFGGNLGRAVFQAKKRVLEPLGLVEEGAKTAPGKKRPVEPSPQRSPDSSTGIGKKGQQPARKRLNFGQTGDSESVPDPQPIGEPPAAPSSVGSGTMAAGGGAPMADNNEGADGVGSSSGNWHCDSTWLGDRVITTSTRTWALPTYNNHLYKQISNGTSGGSTNDNTYFGYSTPWGYFDFNRFHCHFSPRDWQRLINNNWGFRPKRLSFKLFNIQVKEVTQNEGTKTIANNLTSTIQVFTDSEYQLPYVLGSAHQGCLPPFPADVFMIPQYGYLTLNNGSQAVGRSSFYCLEYFPSQMLRTGNNFSFSYTFEDVPFHSSYAHSQSLDRLMNPLIDQYLYYLSRTQSTGGTAGTQQLLFSQAGPSNMSAQARNWLPGPCYRQQRVSTTLSQNNNSNFAWTGATKYHLNGRDSLVNPGVAMATNKDDEDRFFPSSGILMFGKQGAGKDNVDYSNVMLTSEEEIKTTNPVATEQYGVVADNLQQQNTAPIVGAVNSQGALPGMVWQNRDVYLQGPIWAKIPHTDGNFHPSPLMGGFGLKHPPPQILIKNTPVPADPPTAFNQAKLNSFITQYSTGQVSVEIVWELQKENSKRWNPEIQYTSNYYKSTNVDFAVNTEGVYSEPRPIGTRYLTRNL

SEQ ID NO: 501 - protein, 738 aa, Artificial Sequence; identical to SEQ ID NO: 499
  source: /note="Description of Artificial Sequence: Synthetic polypeptide"

SEQ ID NO: 502 - DNA, 2214 bp, Artificial Sequence
  source: /note="Description of Artificial Sequence: Synthetic polynucleotide"
atggctgctgacggttatcttccagattggctcgaggacaacctctctgagggcattcgcgagtggtgggacctgaaacctggagcccccaagcccaaggccaaccagcagaagcaggacgacggccggggtctggtgcttcctggctacaagtacctcggacccttcaacggactcgacaagggggagcccgtcaacgcggcggacgcagcggccctcgagcacgacaaggcctacgaccagcagctcaaagcgggtgacaatccgtacctgcggtataaccacgccgacgccgagtttcaggagcgtctgcaagaagatacgtcttttgggggcaacctcgggcgagcagtcttccaggccaagaagcgggttctcgaacctctcggtctggttgaggaagctgctaagacggctcctggaaagaagagaccggtagaaccgtcacctcagcgttcccccgactcctccacgggcatcggcaagaaaggccagcagcccgctagaaagagactgaactttgggcagactggcgactcagagtcagtccccgaccctcaaccaatcggagaaccaccagcaggcccctctggtctgggatctggtacaatggctgcaggcggtggcgctccaatggcagacaataacgaaggcgccgacggagtgggtaatgcctcaggaaattggcattgcgattccacatggctgggcgacagagtcatcaccaccagcacccgaacctgggctttgcccacctacaacaaccacctctacaagcaaatctccagtcagtcagcaggtagcaccaacgacaacgtctacttcggctacagcaccccctgggggtattttgacttcaacagattccactgtcacttctcaccacgtgactggcagcggctcatcaacaacaactggggattccggcccaagaagctcaacttcaagctgttcaacatccaggtcaaggaggtcacaacgaatgacggcgtcacgaccatcgccaataaccttaccagcacggttcaggtcttttcggactcggaataccagctgccctacgtcctcggctccgcacaccagggctgcctgcctccgttcccggcggacgtcttcatgattccccagtacggctacctgactctgaacaatggcagccaatcggtgggtcgttcctctttctactgcctggaatatttcccttctcaaatgctgagaacgggcaacaacttcaccttcagctacaccttcgaggacgttcccttccacagcagctacgcacacagccagagcctggaccggctgatgaatcctcttatcgaccagtacctgtattacctggccagaacacagagcaacgcaggaggcacagctggcaatcgggaactgcagttttatcagggcgggcctaccaccatggccgaacaagccaaaaactggctgcctagaccttgcttccggcaacaaagagtctccaagacgctggatcaaaacaacaacagcaactttgcttggactggtgccaccaaataccatctaaatggaagaaattcattggttaatcccggtgtcgccatggcaacccacaaggacgacgaggaacgcttcttcccttcgagcggagtcctgatttttggaaaaactggagcagctaataagactacactggaaaatgtgttaatgacaaatgaagaggaaattcgtcctaccaacccggtagccaccgaggaatacgggactgttagcagcaacctgcaggcggctaacactgcagcccagacacaagttgtcaacaaccagggagccttacctggtatggtctggcagaaccgggacgtgtacctgcagggtcccatctgggccaagattcctcacacggacggcaactttcacccgtctccgctgatgggcggctttggactgaagcatccgcctcctcagatcctgatcaaaaacactcctgttcctgctaatcccccggaggtgtttacgcctgccaagtttgcttctttcatcacacagtacagcaccggccaggtcagcgtggagatcgagtgggagctgcagaaggagaacagcaagcgctggaacccagagattcagtatacctccaattttgacaaacagactggtgtggactttgccgttgacagccagggtgtttattctgagcctcgccccattggtactcgttacctcacccgtaatctgtaa

SEQ ID NO: 503 - protein, 737 aa, Artificial Sequence
  source: /note="Description of Artificial Sequence: Synthetic polypeptide"
MAADGYLPDWLEDNLSEGIREWWDLKPGAPKPKANQQKQDDGRGLVLPGYKYLGPFNGLDKGEPVNAADAAALEHDKAYDQQLKAGDNPYLRYNHADAEFQERLQEDTSFGGNLGRAVFQAKKRVLEPLGLVEEAAKTAPGKKRPVEPSPQRSPDSSTGIGKKGQQPARKRLNFGQTGDSESVPDPQPIGEPPAGPSGLGSGTMAAGGGAPMADNNEGADGVGNASGNWHCDSTWLGDRVITTSTRTWALPTYNNHLYKQISSQSAGSTNDNVYFGYSTPWGYFDFNRFHCHFSPRDWQRLINNNWGFRPKKLNFKLFNIQVKEVTTNDGVTTIANNLTSTVQVFSDSEYQLPYVLGSAHQGCLPPFPADVFMIPQYGYLTLNNGSQSVGRSSFYCLEYFPSQMLRTGNNFTFSYTFEDVPFHSSYAHSQSLDRLMNPLIDQYLYYLARTQSNAGGTAGNRELQFYQGGPTTMAEQAKNWLPRPCFRQQRVSKTLDQNNNSNFAWTGATKYHLNGRNSLVNPGVAMATHKDDEERFFPSSGVLIFGKTGAANKTTLENVLMTNEEEIRPTNPVATEEYGTVSSNLQAANTAAQTQVVNNQGALPGMVWQNRDVYLQGPIWAKIPHTDGNFHPSPLMGGFGLKHPPPQILIKNTPVPANPPEVFTPAKFASFITQYSTGQVSVEIEWELQKENSKRWNPEIQYTSNFDKQTGVDFAVDSQGVYSEPRPIGTRYLTRNL

SEQ ID NO: 504 - DNA, 2214 bp, Artificial Sequence
  source: /note="Description of Artificial Sequence: Synthetic polynucleotide"
atggctgctgacggttatcttccagattggctcgaggacaacctctctgagggcattcgcgagtggtgggacctgaaacctggagcccccaagcccaaggccaaccagcagaagcaggacgacggccggggtctggtgcttcctggctacaagtacctcggacccttcaacggactcgacaagggggagcccgtcaacgcggcggacgcagcggccctcgagcacgacaaggcctacgaccagcagctcaaagcgggtgacaatccgtacctgcggtataaccatgccgacgccgagtttcaggagcgtctgcaagaagatacgtcttttgggggcaacctcgggcgagcagtcctccaggccaagaagcgggttctcgaacctctcggtctggttgaggaagctgctaagacggctcctggaaagaagagaccggtagaaccgtcacctcagcgttcccccgactcctccacgggcatcggcaagaaaggccagcagcccgctagaaagagactgaactttgggcagactggcgactcagagtcagtccccgaccctcaaccaatcggagaaccaccagcaggcccctctggtctgggatctggtacaatggctgcaggcggtggcgctccaatggcagacaataacgaaggcgccgacggagtgggtaatgcctcaggaaattggcattgcgattccacatggctgggcgacagagtcatcaccaccagcacccgaacctgggctttgcccacctacaacaaccacctctacaagcaaatctccagtcagtcagcaggtagcaccaacgacaacgtctacttcggctacagcaccccctgggggtattttgacttcaacagattccactgtcacttctcaccacgtgactggcagcggctcatcaacaacaactggggattccggcccaagaagctcaacttcaagctgttcaacatccaggtcaaggaggtcacaacgaatgacggcgtcacgaccatcgccaataaccttaccagcacggttcaggtcttttcggactcggaataccagctgccctacgtcctcggctccgcacaccagggctgcctgcctccgttcccggcggacgtcttcatgattccccagtacggctacctgactctgaacaatggcagccaatcggtgggtcgttcctctttctactgcctggaatatttcccttctcaaatgctgagaacgggcaacaacttcaccttcagctacaccttcgaggacgttcccttccacagcagctacgcacacagccagagcctggaccggctgatgaatcctcttatcgaccagtacctgtattacctggccagaacacagagcaacgcaggaggcacagctggcaatcgggaactgcagttttatcagggcgggcctaccaccatggccgaacaagccaaaaactggctgcctggaccttgcttccggcaacaaagagtctccaagacgctggatcaaaacaacaacagcaactttgcttggactggtgccaccaaataccatctaaatggaagaaattcattggttaatcccggtgtcgccatggcaacccacaaggacgacgaggaacgcttcttcccttcgagcggagtcctgatttttggaaaaactggagcagctaataagactacactggaaaatgtgttaatgacaaatgaagaggaaattcgtcctaccaacccggtagccaccgaggaatacgggactgttagcagcaacctgcaggcggctaacactgcagcccagacacaagttgtcaacaaccagggagccttacctggtatggtctggcagaaccgggacgtgtacctgcagggtcccatctgggccaagattcctcacacggacggcaactttcacccgtctccgctgatgggcggctttggactgaagcatccgcctcctcagatcctgatcaaaaacactcctgttcctgctaatcccccggaggtgtttacgcctgccaagtttgcttctttcatcacacagtacagcaccggccaggtcagcgtggagatcgagtgggagctgcagaaggagaacagcaagcgctggaacccagagattcagtatacctccaattttgacaaacagactggtgtggactttgccgttgacagccagggtgtttattctgagcctcgccccattggtactcgttacctcacccgtaatctgtaa

SEQ ID NO: 505 - protein, 737 aa, Artificial Sequence; identical to SEQ ID NO: 464
  source: /note="Description of Artificial Sequence: Synthetic polypeptide"

SEQ ID NO: 506 - protein, 737 aa, Artificial Sequence
  source: /note="Description of Artificial Sequence: Synthetic polypeptide"
MAADGYLPDWLEDNLSEGIREWWDLKPGAPKPKANQQKQDDGRGLVLPGYKYLGPFNGLDKGEPVNAADAAALEHDKAYDQQLKAGDNPYLRYNHADAEFQERLQEDTSFGGNLGRAVLQAKKRVLEPLGLVEEAAKTAPGKKRPVEPSPQRSPDSSTGIGKKGQQPARKRLNFGQTGDSESVPDPQPIGEPPAGPSGLGSGTMAAGGGAPMADNNEGADGVGNASGNWHCDSTWLGDRVITTSTRTWALPTYNNHLYKQISSQSAGSTNDNVYFGYSTPWGYFDFNRFHCHFSPRDWQRLINNNWGFRPKKLNFKLFNIQVKEVTTNDGVTTIANNLTSTVQVFSDSEYQLPYVLGSAHQGCLPPFPADVFMIPQYGYLTLNNGSQSVGRSSFYCLEYFPSQMLRTGNNFTFSYTFEDVPFHSSYAHSQSLDRLMNPLIDQYLYYLARTQSNAGGTAGNRELQFYQGGPTTMAEQAKNWLPGPCFRQQRVSKTLDQNNNSNFAWTGATKYHLNGRNSLVNPGVAMATHKDDEERFFPSSGVLIFGKTGAANKTTLENVLMTNEEEIRPTNPVATEEYGTVSSNLQAANTAAQTQVVNNQGALPGMVWQNRDVYLQGPIWAKIPHTDGNFHPSPLMGGFGLKHPPPQILIKNTPVPANPPEVFTPAKFASFITQYSTGQVSVEIEWELQKENSKRWNPEIQYTSNFDKQTGVDFAVDSQGVYSEPRPIGTRYLTRNL

SEQ ID NO: 507 - DNA, 2217 bp, Artificial Sequence
  source: /note="Description of Artificial Sequence: Synthetic polynucleotide"
atggctgccgatggttatcttccagattggctcgaggacaacctctctgagggcattcgcgagtggtgggacctgaaacctggagccccgaaacccaaagccaaccagcaaaagcaggacgacggccggggtctggtgcttcctggctacaagtacctcggacccttcaacggactcgacaagggggagcccgtcaacgcggcggacgcagcggccctcgagcacgacaaggcctacgaccagcagctcaaagcgggtgacaatccgtacctgcggtataatcacgccgacgccgagtttcaggagcgtctgcaagaagatacgtcttttgggggcaacctcgggcgagcagtcttccaggccaagaagcgggttctcgaacctctcggtctggttgaggaaggcgctaagacggctcctggaaagaagagaccggtagagccgtcaccacagcgttcccccgactcctccacgggcatcggcaagaaaggccagcagcccgccagaaagagactcaatttcggtcagactggcgactcagagtcagtccccgaccctcaacctatcggagaacctccagcagcgccctctagtgtgggatctggtacaatggctgcaggcggtggcgcaccaatggcagacaataacgaaggtgccgacggagtgggtagttcctcgggaaattggcattgcgattccacatggctgggcgacagagtcatcaccaccagcacccgaacctgggccctgcccacctacaacaaccacctctacaagcaaatctccaacgggacctcgggaggcagcaccaacgacaacacctactttggctacagcaccccctgggggtattttgactttaacagattccactgccacttctcaccacgtgactggcagcgactcatcaacaacaactggggattccggcccaagagactcagcttcaagctcttcaacatccaggtcaaagaggtcacgcagaatgaaggcaccaagaccatcgccaataacctcaccagcaccatccaggtgtttacggactcggaataccagctgccgtacgtcctcggctctgcccaccagggctgcctgcctccgttcccggcggacgtcttcatgattcctcagtacggctacctgactctcaacaacggtagtcaggccgtgggacgttcctccttctactgcctggagtacttcccctctcagatgctgagaacgggcaacaacttttccttcagctacactttcgaggacgtgcctttccacagcagctacgcgcacagccagagtttggacaggctgatgaatcctctcatcgaccagtacctgtactacctgtcaagaacccagtctacgggaggcacagcgggaacccagcagttgctgttttctcaggccgggcctagcaacatgtcggctcaggccagaaactggctgcctggaccctgctacagacagcagcgcgtctccacgacactgtcgcaaaacaacaacagcaactttgcctggactggtgccaccaagtatcatctgaacggcagagactctctggtgaatccgggcgtcgccatggcaaccaacaaggacgacgaggaccgcttcttcccacccagcggcatcctcatgtttggcaagcagggagctggaaaagacaacgtggactatagcaacgtgatgctaaccagcgaggaagaaatcaagaccaccaaccccgtggccacagaacagtatggcgtggtggctgataacctacagcagcaaaacaccgctcctattgtgggggccgtcaacagccagggagccttacctggcatggtctggcagaaccgggacgtgtacctgcagggtcctatttgggccaagattcctcacacagatggcaactttcacccgtctcctttaatgggcggctttggacttaaacatccgcctcctcagatcctcatcaaaaacactcctgttcctgcggatcctccaacagcgttcaaccaggccaagctgaattctttcatcacgcagtacagcaccggacaagtcagcgtggtgatcgagtgggagctgcagaaggagaacagcaagcgctggaacccagagattcagtatacttccaactactacaaatctacaaatgtggactttgctgttaatactgagggtgtttactctgagcttcgccccattggcactcgttacctcacccgtaatctgtaa

SEQ ID NO: 508 - protein, 738 aa, Artificial Sequence
  source: /note="Description of Artificial Sequence: Synthetic polypeptide"
MAADGYLPDWLEDNLSEGIREWWDLKPGAPKPKANQQKQDDGRGLVLPGYKYLGPFNGLDKGEPVNAADAAALEHDKAYDQQLKAGDNPYLRYNHADAEFQERLQEDTSFGGNLGRAVFQAKKRVLEPLGLVEEGAKTAPGKKRPVEPSPQRSPDSSTGIGKKGQQPARKRLNFGQTGDSESVPDPQPIGEPPAAPSSVGSGTMAAGGGAPMADNNEGADGVGSSSGNWHCDSTWLGDRVITTSTRTWALPTYNNHLYKQISNGTSGGSTNDNTYFGYSTPWGYFDFNRFHCHFSPRDWQRLINNNWGFRPKRLSFKLFNIQVKEVTQNEGTKTIANNLTSTIQVFTDSEYQLPYVLGSAHQGCLPPFPADVFMIPQYGYLTLNNGSQAVGRSSFYCLEYFPSQMLRTGNNFSFSYTFEDVPFHSSYAHSQSLDRLMNPLIDQYLYYLSRTQSTGGTAGTQQLLFSQAGPSNMSAQARNWLPGPCYRQQRVSTTLSQNNNSNFAWTGATKYHLNGRDSLVNPGVAMATNKDDEDRFFPPSGILMFGKQGAGKDNVDYSNVMLTSEEEIKTTNPVATEQYGVVADNLQQQNTAPIVGAVNSQGALPGMVWQNRDVYLQGPIWAKIPHTDGNFHPSPLMGGFGLKHPPPQILIKNTPVPADPPTAFNQAKLNSFITQYSTGQVSVVIEWELQKENSKRWNPEIQYTSNYYKSTNVDFAVNTEGVYSELRPIGTRYLTRNL

SEQ ID NO: 509 - DNA, 2214 bp, Artificial Sequence
  source: /note="Description of Artificial Sequence: Synthetic polynucleotide"
atggctgctgacggttatcttccagattggctcgaggacaacctctctgagggcattcgcgagtggtgggacctgaaacctggagcccccaagcccaaggccaaccagcagaagcaggacgacggccggggtctggtgcttcctggctacaagtacctcggacccttcaacggactcgacaagggggagcccgtcaacgcggcggacgcagcggccctcgagcacgacaaggcctacgaccagcagctcaaagcgggtgacaatccgtacctgcggtataaccacgccgacgccgagtttcaggagcgtctgcaagaagatacgtcttttgggggcaacctcgggcgagcagtcttccaggccaagaagcgggttctcgaacctctcggtctggttgaggaagctgctaagacggctcctggaaagaagagaccggtagaaccgtcacctcagcgttcccccgactcctccacgggcatcggcaagaaaggccagcagcccgctagaaagagactgaactttgggcagactggcgactcagagtcagtccccgaccctcaaccaatcggagaaccaccagcaggcccctctggtctgggatctggtacaatggctgcaggcggtggcgccccaatggcagacaataacgaaggcgccgacggagtgggtaatgcctcaggaaattggcattgcgattccacatggctgggcgacagagtcatcaccaccagcacccgaacctgggctttgcccacctacaacaaccacctctacaagcaaatctccagtcagtcagcaggtagcaccaacgacaacgtctacttcggctacagcaccccctgggggtattttgacttcaacagattccactgtcacttctcaccacgtgactggcagcggctcatcaacaacaactggggattccggcccaagaagctcaacttcaagctgttcaacatccaggtcaaggaggtcacaacgaatgacggcgtcacgaccatcgccaataaccttaccagcacggttcaggtcttttcggactcggaataccagctgccctacgtcctcggctccgcacaccagggctgcctgcctccgttcccggcggacgtcttcatgattccccagtacggctacctgactctgaacaatggcagccaatcggtgggtcgttcctctttctactgcctggaatatttcccttctcaaatgctgagaacgggcaacaacttcaccatcagctacaccttcgaggacgttcccttccacagcagctacgcacacagccagagcctggaccggctgatgaatcctcttatcgaccagtacctgtattacctggccagaacacagagcaacgcaggaggcacagctggcaatcaggaactgcagttttatcagggcgggcctaccaccatggccgaacaagccaaaaactggctgcctggaccttgcttccggcaacaaagagtctccaagacgctggatcaaaacaacaacagcaactttgcttggactggtgccaccaaataccatctaaatggaagaaattcattggttaatcccggtgtcgccatggcaacccacaaggacgacgaggaacgcttcttcccttcgagcggagtcctgatttttggaaaaactggagcagctaataagactacactggaaaatgtgttaatgacaaatgaagaggaaattcgtcctaccaacccggtagccaccgaggaatacgggactgttagcagcaacctgcaggcggctaacactgcagcccagacacaagttgtcaacaaccagggagccttacctggtatggtctggcagaaccgggacgtgtacctgcagggtcccatctgggccaagattcctcacacagatggcaactttcacccgtctcctttaatgggcggctttggacttaaacatccgcctcctcagatcctcatcaaaaacactcctgttcctgcggatcctccaacagcgttcaaccaggccaagctgaattctttcatcacgcagtacagcaccggacaagtcagcgtggagatcgagtgggagctgcagaaggagaacagcaagcgctggaacccagagattcagtatacttccaactactacaaatctacaaatgtggactttgctgttaatactgagggtgtttactctgagcctcgccccattggcactcgttacctcacccgtaatctgtaa

SEQ ID NO: 510 - protein, 737 aa, Artificial Sequence
  source: /note="Description of Artificial Sequence: Synthetic polypeptide"
MAADGYLPDWLEDNLSEGIREWWDLKPGAPKPKANQQKQDDGRGLVLPGYKYLGPFNGLDKGEPVNAADAAALEHDKAYDQQLKAGDNPYLRYNHADAEFQERLQEDTSFGGNLGRAVFQAKKRVLEPLGLVEEAAKTAPGKKRPVEPSPQRSPDSSTGIGKKGQQPARKRLNFGQTGDSESVPDPQPIGEPPAGPSGLGSGTMAAGGGAPMADNNEGADGVGNASGNWHCDSTWLGDRVITTSTRTWALPTYNNHLYKQISSQSAGSTNDNVYFGYSTPWGYFDFNRFHCHFSPRDWQRLINNNWGFRPKKLNFKLFNIQVKEVTTNDGVTTIANNLTSTVQVFSDSEYQLPYVLGSAHQGCLPPFPADVFMIPQYGYLTLNNGSQSVGRSSFYCLEYFPSQMLRTGNNFTISYTFEDVPFHSSYAHSQSLDRLMNPLIDQYLYYLARTQSNAGGTAGNQELQFYQGGPTTMAEQAKNWLPGPCFRQQRVSKTLDQNNNSNFAWTGATKYHLNGRNSLVNPGVAMATHKDDEERFFPSSGVLIFGKTGAANKTTLENVLMTNEEEIRPTNPVATEEYGTVSSNLQAANTAAQTQVVNNQGALPGMVWQNRDVYLQGPIWAKIPHTDGNFHPSPLMGGFGLKHPPPQILIKNTPVPADPPTAFNQAKLNSFITQYSTGQVSVEIEWELQKENSKRWNPEIQYTSNYYKSTNVDFAVNTEGVYSEPRPIGTRYLTRNL

SEQ ID NO: 511 - DNA, 2217 bp, Artificial Sequence
  source: /note="Description of Artificial Sequence: Synthetic polynucleotide"
atggctgccgatggttatcttccagattggctcgaggacaacctctctgagggcattcgcgagtggtgggacctgaaacctggagccccgaaacccaaagccaaccagcaaaagcaggacgacggccggggtctggtgcttcctggctacaagtacctcggacccttcaacggactcgacaagggggagcccgtcaacgcggcggacgcagcggccctcgagcacgacaaggcctacgaccagcagctcaaagcgggtgacaatccgtacctgcggtataatcacgccgacgccgagtttcaggagcgtctgcaagaagatacgtcttttgggggcaacctcgggcgagcagtcttccaggccaagaagcgggttctcgaacctctcggtctggttgaggaaggcgctaagacggctcctggaaagaagagaccggtagagccgtcaccacagcgttcccccgactcctccacgggcatcggcaagaaaggccagcagcccgccagaaagagactcaatttcggtcagactggcgactcagagtcagtccccgaccctcaacctatcggagaacctccagcagcgccctctagtgtgggatctggtacaatggctgcaggcggtggcgcaccaatggcagacaataacgaaggtgccgacggagtgggtagttcctcgggaaattggcattgcgattccacatggctgggcgacagagtcatcaccaccagcacccgaacctgggccctgcccgcctacaacaaccacctctacaagcaaatctccaacgggacctcgggaggcagcaccaacgacaacacctactttggctacagcaccccctgggggtattttgactttaacagattccactgccacttctcaccacgtgactggcagcgactcatcaacaacaactggggattccggcccaagagactcagcttcaagctcttcaacatccaggtcaaagaggtcacgcagaatgaaggcaccaagaccatcgccaataacctcaccagcaccatccaggtgtttacggactcggaataccagctgccgtacgtcctcggctctgcccaccagggctgcctgcctccgttcccggcggatgtcttcatgattcctcagtacggctacctgactctcaacaacggtagtcaggccgtgggacgttcctccttctactgcctggagtacttcccctctcagatgctgagaacgggcaacaacttttccttcagctacactttcgaggacgtgcctttccacagcagctacgcgcacagccagagtttggacaggctgatgaatcctctcatcgaccagtacctgtactacctgtcaagaacccagtctacgggaggcacagcgggaacccagcagttgctgttttctcaggccgggcctagcaacatgtcggctcaggccagaaactggctgcctggaccctgctacagacagcagcgcgtctccacgacactgtcgcaaaacaacaacagcaactttgcctggactggtgccaccaagtatcatctgagcggcagagactctctggtgaatccgggcgtcgccatggcaaccaacaaggacgacgaggaccgcttcttcccatccagcggcatcctcatgtttggcaagcagggagctggaaaagacaacgtggactatagcaacgtgatgctaaccagcgaggaagaaatcaagaccaccaaccccgtggccacagaacagtatggcgtggtggctgataacctacagcagcaaaacaccgctcctattgtgggggccgtcaacagccagggagccttacctggcatggtctggcagaaccgggacgtgtacctgcagggtcctatttgggccaagattcctcacacagatggcaactttcacccgtctcctttaatgggcggctttggacttaaacatccgcctcctcagatcctcatcaaaaacactcctgttcctgcggatcctccaacagcgttcaaccaggccaagctgaattcttccatcacgcagtacagcaccggacaagtcagcgtggagatcgagtgggagctgcagaaggagaacagcaagcgctggaacccagagattcagtatacttccaactactacaaatctacaaatgtggactttgctgttaatactgagggtgtttactctgagcctcgccccattggcactcgttacctcacccgtaatttgtaa

SEQ ID NO: 512 - protein, 738 aa, Artificial Sequence
  source: /note="Description of Artificial Sequence: Synthetic polypeptide"
MAADGYLPDWLEDNLSEGIREWWDLKPGAPKPKANQQKQDDGRGLVLPGYKYLGPFNGLDKGEPVNAADAAALEHDKAYDQQLKAGDNPYLRYNHADAEFQERLQEDTSFGGNLGRAVFQAKKRVLEPLGLVEEGAKTAPGKKRPVEPSPQRSPDSSTGIGKKGQQPARKRLNFGQTGDSESVPDPQPIGEPPAAPSSVGSGTMAAGGGAPMADNNEGADGVGSSSGNWHCDSTWLGDRVITTSTRTWALPAYNNHLYKQISNGTSGGSTNDNTYFGYSTPWGYFDFNRFHCHFSPRDWQRLINNNWGFRPKRLSFKLFNIQVKEVTQNEGTKTIANNLTSTIQVFTDSEYQLPYVLGSAHQGCLPPFPADVFMIPQYGYLTLNNGSQAVGRSSFYCLEYFPSQMLRTGNNFSFSYTFEDVPFHSSYAHSQSLDRLMNPLIDQYLYYLSRTQSTGGTAGTQQLLFSQAGPSNMSAQARNWLPGPCYRQQRVSTTLSQNNNSNFAWTGATKYHLSGRDSLVNPGVAMATNKDDEDRFFPSSGILMFGKQGAGKDNVDYSNVMLTSEEEIKTTNPVATEQYGVVADNLQQQNTAPIVGAVNSQGALPGMVWQNRDVYLQGPIWAKIPHTDGNFHPSPLMGGFGLKHPPPQILIKNTPVPADPPTAFNQAKLNSSITQYSTGQVSVEIEWELQKENSKRWNPEIQYTSNYYKSTNVDFAVNTEGVYSEPRPIGTRYLTRNL

SEQ ID NO: 513 - protein, 736 aa, Artificial Sequence; identical to SEQ ID NO: 13
  source: /note="Description of Artificial Sequence: Synthetic polypeptide"

SEQ ID NO: 514 - DNA, 2217 bp, Artificial Sequence
  source: /note="Description of Artificial Sequence: Synthetic polynucleotide"
atggctgctgacggttatcttccagattggctcgaggacaacctctctgagggcattcgcgagtggtgggacctgaaacctggagcccccaagcccaaggccaaccagcagaagcaggacgacggccggggtctggtgcttcctggctacaagtacctcggacccttcaacggactcgacaagggggagcccgtcaacgcggcggacgcagcggccctcgagcacgacaaggcctacgaccagcagctcaaagcgggtgacaatccgtacctgcggtataaccacgccgacgccgagtttcaggagcgtctgcaagaagatacgtcttttgggggcaacctcgggcgagcagtcttccaggccaagaagcgggttctcgaacctctcggtctggttgaggaagctgctaagacggctcctggaaagaagagaccggtagaaccgtcacctcagcgttcccccgactcctccacgggcatcggcaagaaaggccagcagcccgctaaaaagagactgaactttggtcagactggcgactcagagtcagtccccgaccctcaaccaatcggagaaccaccagcaggcccctctggtctgggatctggtacaatggctgcaggcggtggcgctccaatggcagacaataacgaaggcgccgacggagtgggtagttcctcaggaaattggcattgcgattccacatggctgggcgacagagtcatcaccaccagcacccgaacctgggccctgcccacctacaacaaccacctctacaagcaaatatccaatgggacatcgggaggaagcaccaacgacaacacctacttcggctacagcaccccctgggggtattttgacttcaacagattccactgccacttctcaccacgtgactggcagcgactcatcaacaacaactggggattccggccaaaaagactcagcttcaagctcttcaacatccaggtcaaggaggtcacgcagaatgaaggcaccaagaccatcgccaataaccttaccagcacgattcaggtatttacggactcggaataccagctgccgtacgtcctcggctccgcgcaccagggctgcctgcctccgttcccggcggacgtcttcatgattccccagtacggctaccttacactgaacaatggaagtcaagccgtaggccgttcctccttctactgcctggaatattttccatctcaaatgctgcgaactggaaacaattttgaattcagctacaccttcgaggacgtgcctttccacagcagctacgcacacagccagagcttggaccgactgatgaatcctctcatcgaccagtacctgtactacttatccagaactcagtccacaggaggaactcaaggtacccagcaattgttattttctcaagctgggcctgcaaacatgtcggctcaggctaagaactggctacctggaccttgctaccggcagcagcgagtctctacgacactgtcgcaaaacaacaacagcaactttgcttggactggtgccaccaaatatcacctgaacggaagagactctttggtaaatcccggtgtcgccatggcaacccacaaggacgacgaggaacgcttcttcccgtcgagtggagtcctgatgtttggaaaacagggtgctggaagagacaatgtggactacagcagcgttatgctaaccagcgaagaagaaattaaaaccactaaccctgtagccacagaacaatacggtgtggtggctgacaacttgcagcaaaccaatacagggcctattgtgggaaatgtcaacagccaaggagccttacctggcatggtctggcagaaccgagacgtgtacctgcagggtcccatctgggccaagattcctcacacggacggcaacttccacccttcaccgctaatgggaggatttggactgaagcacccacctcctcagatcctgatcaagaacacgccggtacctgcggatcctccaacaacgttcagccaggcgaaattggcttccttcattacgcagtacagcaccggacaggtcagcgtggaaatcgagtgggagctgcagaaggagaacagcaaacgctggaacccagagattcagtacacttcaaactactacaaatctacaaatgtggactttgctgtcaatacagagggaacttattctgagcctcgccccattggtactcgttacctcacccgtaatctgtaa

SEQ ID NO: 515 - protein, 738 aa, Artificial Sequence
  source: /note="Description of Artificial Sequence: Synthetic polypeptide"
MAADGYLPDWLEDNLSEGIREWWDLKPGAPKPKANQQKQDDGRGLVLPGYKYLGPFNGLDKGEPVNAADAAALEHDKAYDQQLKAGDNPYLRYNHADAEFQERLQEDTSFGGNLGRAVFQAKKRVLEPLGLVEEGAKTAPGKKRPVEPSPQRSPDSSTGIGKKGQQPARKRLNFGQTGDSESVPDPQPLGEPPAAPSSVGSGTMAAGGGAPMADNNEGADGVGSSSGNWHCDSTWLGDRVITTSTRTWALPTYNNHLYKQISNGTSGGSTNDNTYFGYSTPWGYFDFNRFHCHFSPRDWQRLINNNWGFRPKRLSFKLFNIQVKEVTQNEGTKTIANNLTSTIQVFTDSEYQLPYVLGSAHQGCLPPFPADVFMIPQYGYLTLNNGSQAVGRSSFYCLEYFPSQMLRTGNNFSFSYTFEDVPFHSSYAHSQSLDRLMNPLIDQYLYYLSRTQSTGGTAGTQQLLFSQAGPSNMSAQARNWLPGPCYRQQRVSTTLSQNNNSNFAWTGATKYHLNGRDSLVNPGVAMATNKDDEDRFFPSSGILMFGKQGAGKDNVDYSNVMLTSEEEIKTTNPVATEQYGVVADNLQRQNTAPIVGAVNSQGALPGMVWQNRDVYLQGPIWAKIPHTDGNFHPSPLMGGFGLKHPPPQILIKNTPVPADPPTAFNQAKLNSFITQYSTGQVSVEIEWELQKENSKRWNPEIQYTSNYYKSTNVDFAVNTEGVYSEPRPIGTRYLTRNL

SEQ ID NO: 516 - protein, 736 aa, Artificial Sequence
  source: /note="Description of Artificial Sequence: Synthetic polypeptide"
MAADGYLPDWLEDNLSEGIREWLNLKPGAPQPKANQQKQDNARGLVLPGYKYLGPFNGLDKGDPVNEADAAALEHDKAYGQQLKAGDNPYLKYNHADAEFQERLQKDTSFGGNLGKAVFQAKKRILEPLGLVETPAKTAPGKKRPVDPSPQRSPDSSSGIGKKSPHPARKRLNFGQTGEAESVPDPQPIGEPPSDPSSVGSGTMAAGGGAPMADNNEGADGVGNSSGNWHCDSTWLGDRVITTSTRTWALPTYNNHLYKQISSQSGATNDNHYFGYSTPWGYFDFNRFHCHFSPRDWQRLINNNWGFRPKRLSFKLFNIQVKEVTQNDGTTTIANNLTSTVQVFTDSEYQLPYVLGSAHQGCLPPFPADVFMIPQYGYLTLNNGSQAVGRSSFYCLEYFPSQMLRTGNNFQFSYTFEDVPFHSSYAHSQSLDRLMNPLIDQYLYYLSKTQGTNATVQGAKLQFSQAGPSNMRDQARNWLPGPCYRQQRVSKTANDNNNSEYAWTGATKYHLNGRDSLVNPGPAMASHKDDEEKFFPMNGTLVFGKNGAGNSNVDIENVMITDEEEIRTTNPVATEQYGVVSDNLQSSNTRPITGDVDSQGVLPGMVWQDRDVYLQGPIWAKIPHTDGHFHPSPLMGGFGLKHPPPQILIKNTPVPANPATTFTPGKFASFITQYSTGQVSVQIEWELQKENSKRWNPEIQYTSNYNKSVNVDFTVDTNGVYSEPRPIGTRYLTRNL

SEQ ID NO: 517 - protein, 736 aa, Artificial Sequence; identical to SEQ ID NO: 92
  source: /note="Description of Artificial Sequence: Synthetic polypeptide"

SEQ ID NO: 518 - protein, 736 aa, Artificial Sequence
  source: /note="Description of Artificial Sequence: Synthetic polypeptide"
MAADGYLPDWLEDNLSEGIREWWDLKPGAPKPKANQQKQDDGRGLVLPGYKYLGPFNGLDKGEPVNAADAAALEHDKAYDQQLKAGDNPYLRYNHADAEFQERLQEDTSFGGNLGRAVFQAKKRVLEPLGLVEEGAKTAPGKKRPVEQSPQEPDSSSGIGKTGQQPAKKRLNFGQTGDSESVPDPQPLGEPPAAPSGLGPNTMASGGGAPMADNNEGADGVGNSSGNWHCDSTWLGDRVITTSTRTWALPTYNNHLYKQISNGTSGGSTNDNTYFGYSTPWGYFDFNRFHCHFSPRDWQRLINNNWGFRPKRLNFKLFNIQVKEVTTNEGTKTIANNLTSTVQVFTDSEYQLPYVLGSAHQGCLPPFPADVFMVPQYGYLTLNNGSQALGRSSFYCLEYFPSQMLRTGNNFQFSYTFEDVPFHSSYAHSQSLDRLMNPLIDQYLYYLVRTQTTGTGGTQTLAFSQAGPSSMANQARNWVPGPCYRQQRVSTTTNQNNNSNFAWTGAAKFKLNGRDSLMNPGVAMASHKDDEDRFFPSSGVLIFGKQGAGNDGVDYSQVLITDEEEIKATNPVATEEYGAVAINNQAANTQAQTGLVHNQGVIPGMVWQNRDVYLQGPIWAKIPHTDGNFHPSPLMGGFGLKHPPPQILIKNTPVPADPPLTFNQAKLNSFITQYSTGQVSVEIEWELQKENSKRWNPEIQYTSNYYKSTNVDFAVNTEGVYSEPRPIGTRYLTRNL

SEQ ID NO: 519 - protein, 736 aa, Artificial Sequence; identical to SEQ ID NO: 518
  source: /note="Description of Artificial Sequence: Synthetic polypeptide"

SEQ ID NO: 520 - protein, 736 aa, Artificial Sequence
  source: /note="Description of Artificial Sequence: Synthetic polypeptide"
MAADGYLPDWLEDNLSEGIREWWDLKPGAPKPKANQQKQDDGRGLVLPGYKYLGPFNGLDKGEPVNAADAAALEHDKAYDQQLKAGDNPYLRYNHADAEFQERLQEDTSFGGNLGRAVFQAKKRVLEPLGLVEEGAKTAPGKKRPVEQSPQEPDSSSGIGKTGQQPAKKRLNFGQTGDSESVPDPQPLGEPPAAPSGLGPNTMASGGGAPMADNNEGADGVGNSSGNWHCDSTWLGDRVITTSTRTWALPTYNNHLYKQISNGTSGGSTNDNTYFGYSTPWGYFDFNRFHCHFSPRDWQRLINNNWGFRPKRLNFKLFNIQVKEVTTNEGTKTIANNLTSTVQVFTDSEYQLPYVLGSAHQGCLPPFPADVFMVPQYGYLTLNNGSQALGRSSFYCLEYFPSQMLRTGNNFQFSYTFEDVPFHSSYAHSQSLDRLMNPLIDQYLYYLVRTQTTGTGGTQTLAFSQAGPSSMANQARNWVPGPCYRQQRVSTTTNQNNNSNFAWTGAAKFKLNGRDSLMNPGVAMASHKDDEDRFFPSSGVLIFGKQGAGNDGVDYSQVLITDEEEIKATNPVATEEYGAVAINNQRANTQAQTGLVHNQGVIPGMVWQNRDVYLQGPIWAKIPHTDGNFHPSPLMGGFGLKHPPPQILIKNTPVPADPPLTFNQAKLNSFITQYSTGQVSVEIEWELQKENSKRWNPEIQYTSNYYKSTNVDFAVNTEGVYSEPRPIGTRYLTRNL

SEQ ID NO: 521 - protein, 736 aa, Artificial Sequence
  source: /note="Description of Artificial Sequence: Synthetic polypeptide"
MAADGYLPDWLEDNLSEGIREWWDLKPGAPKPKANQQKQDDGRGLVLPGYKYLGPFNGLDKGEPVNAADAAALEHDKAYDQQLKAGDNPYLRYNHADAEFQERLQEDTSFGGNLGRAVFQAKKRVLEPLGLVEEGAKTAPGKKRPVEQSPQEPDSSSGIGKTGQQPAKKRLNFGQTGDSESVPDPQPLGEPPAAPSGLGPNTMASGGGAPMADNNEGADGVGNSSGNWHCDSTWLGDRVITTSTRTWALPTYNNHLYKQISNGTSGGSTNDNTYFGYSTPWGYFDFNRFHCHFSPRDWQRLINNNWGFRPKRLNFKLFNIQVKEVTTNEGTKTIANNLTSTVQVFTDSEYQLPYVLGSAHQGCLPPFPADVFMVPQYGYLTLNNGSQALGRSSFYCLEYFPSQMLRTGNNFQFSYTFEDVPFHSSYAHSQSLDRLMNPLIDQYLYYLVRTQTTGTGGTQTLAFSQAGPSSMANQARNWVPGPCYRQQRVSTTTNQNNNSNFAWTGAAKFKLNGRDSLMNPGVAMASHKDDEDAFFPSSGVLIFGKQGAGNDGVDYSQVLITDEEEIKATNPVATEEYGAVAINNQAANTQAQTGLVHNQGVIPGMVWQNRDVYLQGPIWAKIPHTDGNFHPSPLMGGFGLKHPPPQILIKNTPVPADPPLTFNQAKLNSFITQYSTGQVSVEIEWELQKENSKRWNPEIQYTSNYYKSTNVDFAVNTEGVYSEPRPIGTRYLTRNL

SEQ ID NO: 522 - DNA, 1803 bp, Bovine adeno-associated virus
acggcgcctgcggcaaaaaagaggcctctagagcagagtcctcaagagccagactcctcgagcggagttggcaagaaaggcaaacagcctgccagaaagagactcaactttgacgacgaacctggagccggagacgggcctcccccagaaggaccatcttccggagctatgtctactgagactgaaatgcgtgcagcagctggcggaaatggtggcgatgcgggacaaggtgccgagggagtgggtaatgcctccggtgattggcattgcgattccacttggtcagagagccacgtcaccaccacctcaacccgcacctgggtcctgccgacctacaacaaccacctgtacctgcggctcggctcgagcaacgccagcgacaccttcaacggattctccaccccctggggatactttgactttaaccgcttccactgccacttctcgccaagagactggcaaaggctcatcaacaaccactggggactgcgccccaaaagcatgcaagtccgcatcttcaacatccaagttaaggaggtcacgacgtctaacggggagacgaccgtatccaacaacctcaccagcacggtccagatctttgcggacagcacgtacgagctcccgtacgtgatggatgcaggtcaggagggcagcttgcctcctttccccaacgacgtgttcatggtgcctcagtacgggtactgcggactggtaaccggaggcagctctcaaaaccagacagacagaaatgccttctactgtctggagtactttcccagccagatgctgagaaccggaaacaactttgagatggtgtacaagtttgaaaacgtgcccttccactccatgtacgctcacagccagagcctggataggctgatgaacccgctgctggaccagtacctgtgggagctccagtctaccacctctggaggaactctcaaccagggcaattcagccaccaactttgccaagctgaccaaaacaaacttttctggctaccgcaaaaactggctcccggggcccatgatgaagcagcagagattctccaagactgccagtcaaaactacaagattccccagggaagaaacaacagtctgctccattatgagaccagaactaccctcgacggaagatggagcaattttgccccgggaacggccatggcaaccgcagccaacgacgccaccgacttctctcaggcccagctcatctttgcggggcccaacatcaccggcaacaccaccacagatgccaataacctgatgttcacttcagaagatgaacttagggccaccaacccccgggacactgacctgtttggccacctggcaaccaaccagcaaaacgccaccaccgttcctaccgtagacgacgtggacggagtcggcgtgtacccgggaatggtgtggcaggacagagacatttactaccaagggcccatttgggccaaaattccacacacggatggacactttcacccgtctcctctcattggcggatttggactgaaaagcccgcctccacaaatattcatcaaaaacactcctgtacccgccaatcccgcaacgaccttctctccggccagaatcaacagcttcatcacccagtacagcaccggacaggtggctgtcaaaatagaatgggaaatccagaaggagcggtccaagagatggaacccagaggtccagttcacgtccaactacggagcacaggactcgcttctctgggctcccgacaacgccggagcctacaaagagcccagggccattggatcccgatacctcaccaaccacctctag

SEQ ID NO: 523 - DNA, 1617 bp, Bovine adeno-associated virus
atgcgtgcagcagctggcggaaatggtggcgatgcgggacaaggtgccgagggagtgggtaatgcctccggtgattggcattgcgattccacttggtcagagagccacgtcaccaccacctcaacccgcacctgggtcctgccgacctacaacaaccacctgtacctgcggctcggctcgagcaacgccagcgacaccttcaacggattctccaccccctggggatactttgactttaaccgcttccactgccacttctcgccaagagactggcaaaggctcatcaacaaccactggggactgcgccccaaaagcatgcaagtccgcatcttcaacatccaagttaaggaggtcacgacgtctaacggggagacgaccgtatccaacaacctcaccagcacggtccagatctttgcggacagcacgtacgagctcccgtacgtgatggatgcaggtcaggagggcagcttgcctcctttccccaacgacgtgttcatggtgcctcagtacgggtactgcggactggtaaccggaggcagctctcaaaaccagacagacagaaatgccttctactgtctggagtactttcccagccagatgctgagaaccggaaacaactttgagatggtgtacaagtttgaaaacgtgcccttccactccatgtacgctcacagccagagcctggataggctgatgaacccgctgctggaccagtacctgtgggagctccagtctaccacctctggaggaactctcaaccagggcaattcagccaccaactttgccaagctgaccaaaacaaacttttctggctaccgcaaaaactggctcccggggcccatgatgaagcagcagagattctccaagactgccagtcaaaactacaagattccccagggaagaaacaacagtctgctccattatgagaccagaactaccctcgacggaagatggagcaattttgccccgggaacggccatggcaaccgcagccaacgacgccaccgacttctctcaggcccagctcatctttgcggggcccaacatcaccggcaacaccaccacagatgccaataacctgatgttcacttcagaagatgaacttagggccaccaacccccgggacactgacctgtttggccacctggcaaccaaccagcaaaacgccaccaccgttcctaccgtagacgacgtggacggagtcggcgtgtacccgggaatggtgtggcaggacagagacatttactaccaagggcccatttgggccaaaattccacacacggatggacactttcacccgtctcctctcattggcggatttggactgaaaagcccgcctccacaaatattcatcaaaaacactcctgtacccgccaatcccgcaacgaccttctctccggccagaatcaacagcttcatcacccagtacagcaccggacaggtggctgtcaaaatagaatgggaaatccagaaggagcggtccaagagatggaacccagaggtccagttcacgtccaactacggagcacaggactcgcttctctgggctcccgacaacgccggagcctacaaagagcccagggccattggatcccgatacctcaccaaccacctctag

SEQ ID NO: 524 - DNA, 1173 bp, Bovine adeno-associated virus
atggcgctggtaagctggctggtggaacatggcatcacttccgagaagcagtggattcaggagaatcaggagagctacctgtccttcaactccacgggaaactctcggagccagattaaagccgcgcttgacaacgcgtcaaaaattatgagtctgaccaaatctgcctcagactatctcgtgggacagactgttccagaggacatttctgaaaacagaatctggcagatttttgatctcaacggctacgacccggcatacgcgggctctgttctctacggctggtgcactcgcgcctttggaaagaggaacaccgtctggctgtatggacccgcgaccaccggaaagaccaacatcgcggaagccatctctcacaccgtgcccttttatggctgtgtgaactggactaatgagaactttccctttaatgactgtgtggaaaaaatgttgatctggtgggaggagggaaagatgaccagcaaggtggtggaacccgccaaggccatcttgggggggtctagagtacgagtggatcaaaaatgtaaatcctctgtacaagtagactctaccccggtgattatcacctccaatactaacatgtgtgtggtggtggatgggaactccacgacctttgaacaccagcagccgctggaagaccgcatgttcagatttgaactcatgcggcggctcccgccagattttggcaagattaccaagcaggaagtcaaagacttttttgcttgggcaaaggtcaaccaggtgccggtgactcacgagtttatggttcccaagaaagtggcgggaactgagagggcggagacttctagaaaacgcccactggatgacgtcaccaataccaactataaaagtccggagaagcgggcccggctctcagttgttcctgagacgcctcgcagttcagacgtgcctgtagagcccgctcctctgcgacctctcaactggtcttccaggtatgaatgcagatgtgactatcatgctaaatttgactctgtaacgggggaatgtgacgagtgtgaatatttgaatcggggcaaaaatggctgtatctttcataatgctacacattgtcaaatttgtcacgctgttcctccatgggaaaaggaaaatgtgtcagattttaatgattttgatgactgtaataaagagcagtaa

SEQ ID NO: 525 - DNA, 1833 bp, Bovine adeno-associated virus
atggctaccttctatgaagtcattgttcgcgttccatttgatgtggaagagcacctgcctggaatttctgacaactttgtagactgggtaactggtcaaatttgggagctgcctcccgagtcagatttgaatttgactctgattgagcagcctcagctgacggtggctgacagaattcgccgcgtgttcctgtacgagtggaacaaattttccaagcaggagagcaaattctttgtgcagtttgaaaagggatctgaatattttcatctgcacacgctcgtggagacctccggcatctcttctatggtccttggccgctacgtgagtcagattcgcgcccagctggtgaaggtggtgttccagaacattgagccgcggattaacgactgggtcgccatcaccaaggtaaagaagggcggagccaataaggtggtggattctgggtatattcccgcctacctgctgccgaaggtccaaccagagcttcagtgggcgtggactaacctcgaagagtataaattggccgccctcaatctggaggagcgcaaacggctcgtcgctcagtttcagcttgagtcctcgcagcgctcgcaagaggcatcttcccagagggacgtttcggctgacccggtcatcaagagcaagacttcccagaaatacatggcgctggtaagctggctggtggaacatggcatcacttccgagaagcagtggattcaggagaatcaggagagctacctgtccttcaactccacgggaaactctcggagccagattaaagccgcgcttgacaacgcgtcaaaaattatgagtctgaccaaatctgcctcagactatctcgtgggacagactgttccagaggacatttctgaaaacagaatctggcagatttttgatctcaacggctacgacccggcatacgcgggctctgttctctacggctggtgcactcgcgcctttggaaagaggaacaccgtctggctgtatggacccgcgaccaccggaaagaccaacatcgcggaagccatctctcacaccgtgcccttttatggctgtgtgaactggactaatgagaactttccctttaatgactgtgtggaaaaaatgttgatctggtgggaggagggaaagatgaccagcaaggtggtggaacccgccaaggccatcttgggggggtctagagtacgagtggatcaaaaatgtaaatcctctgtacaagtagactctaccccggtgattatcacctccaatactaacatgtgtgtggtggtggatgggaactccacgacctttgaacaccagcagccgctggaagaccgcatgttcagatttgaactcatgcggcggctcccgccagattttggcaagattaccaagcaggaagtcaaagacttttttgcttgggcaaaggtcaaccaggtgccggtgactcacgagtttatggttcccaagaaagtggcgggaactgagagggcggagacttctagaaaacgcccactggatgacgtcaccaataccaactataaaagtccggagaagcgggcccggctctcagttgttcctgagacgcctcgcagttcagacgtgcctgtagagcccgctcctctgcgacctctcaactggtcttccaggtatgaatgcagatgtgactatcatgctaaatttgactctgtaacgggggaatgtgacgagtgtgaatatttgaatcggggcaaaaatggctgtatctttcataatgctacacattgtcaaatttgtcacgctgttcctccatgggaaaaggaaaatgtgtcagattttaatgattttgatgactgtaataaagagcagtaa

SEQ ID NO: 526 - DNA, 2211 bp, Bovine adeno-associated virus
atgtcttttgttgaccaccctccagattggttggaatcgatcggcgacggctttcgtgaatttctcggccttgaggcgggtcccccgaaacccaaggccaatcaacagaagcaagataacgctcgaggtcttgtgcttcctgggtacaagtatcttggtcctgggaacggccttgataagggcgatcctgtcaattttgctgacgaggttgcccgagagcacgacctctcctaccagaaacagcttgaggcgggcgataacccttacctcaagtacaaccacgcggacgcagagtttcaggagaaactcgcttctgacacttcttttgggggaaaccttgggaaggctgttttccaggctaaaaagaggattctcgaacctcttggcctggttgagacgccggataaaacggcgcctgcggcaaaaaagaggcctctagagcagagtcctcaagagccagactcctcgagcggagttggcaagaaaggcaaacagcctgccagaaagagactcaactttgacgacgaacctggagccggagacgggcctcccccagaaggaccatcttccggagctatgtctactgagactgaaatgcgtgcagcagctggcggaaatggtggcgatgcgggacaaggtgccgagggagtgggtaatgcctccggtgattggcattgcgattccacttggtcagagagccacgtcaccaccacctcaacccgcacctgggtcctgccgacctacaacaaccacctgtacctgcggctcggctcgagcaacgccagcgacaccttcaacggattctccaccccctggggatactttgactttaaccgcttccactgccacttctcgccaagagactggcaaaggctcatcaacaaccactggggactgcgccccaaaagcatgcaagtccgcatcttcaacatccaagttaaggaggtcacgacgtctaacggggagacgaccgtatccaacaacctcaccagcacggtccagatctttgcggacagcacgtacgagctcccgtacgtgatggatgcaggtcaggagggcagcttgcctcctttccccaacgacgtgttcatggtgcctcagtacgggtactgcggactggtaaccggaggcagctctcaaaaccagacagacagaaatgccttctactgtctggagtactttcccagccagatgctgagaaccggaaacaactttgagatggtgtacaagtttgaaaacgtgcccttccactccatgtacgctcacagccagagcctggataggctgatgaacccgctgctggaccagtacctgtgggagctccagtctaccacctctggaggaactctcaaccagggcaattcagccaccaactttgccaagctgaccaaaacaaacttttctggctaccgcaaaaactggctcccggggcccatgatgaagcagcagagattctccaagactgccagtcaaaactacaagattccccagggaagaaacaacagtctgctccattatgagaccagaactaccctcgacggaagatggagcaattttgccccgggaacggccatggcaaccgcagccaacgacgccaccgacttctctcaggcccagctcatctttgcggggcccaacatcaccggcaacaccaccacagatgccaataacctgatgttcacttcagaagatgaacttagggccaccaacccccgggacactgacctgtttggccacctggcaaccaaccagcaaaacgccaccaccgttcctaccgtagacgacgtggacggagtcggcgtgtacccgggaatggtgtggcaggacagagacatttactaccaagggcccatttgggccaaaattccacacacggatggacactttcacccgtctcctctcattggcggatttggactgaaaagcccgcctccacaaatattcatcaaaaacactcctgtacccgccaatcccgcaacgaccttctctccggccagaatcaacagcttcatcacccagtacagcaccggacaggtggctgtcaaaatagaatgggaaatccagaaggagcggtccaagagatggaacccagaggtccagttcacgtccaactacggagcacaggactcgcttctctgggctcccgacaacgccggagcctacaaagagcccagggccattggatcccgatacctcaccaaccacctctag

SEQ ID NO: 527 - DNA, 4694 bp, Bovine adeno-associated virus
gtggcactcccccccctgtcgcgttcgctcgttcgctggctcgattgggggggtggcagctcaaagagctgccagacgacggccctctgggccgtcgcccccccaatcgagccagcgaacgagcgaacgcgacaggggggggagtgccacactctctagcaagggggttttgtaggtggtgatgtcattgttgatgtcattatagttgtcacgcgatagttaatgattaacagtcatgtgatgtgtgttatccaataggatgaaagcgcgcgaatgagatctcgcgagacttccggggtataaaaggggtgagtgaacgagcccgccgccattctctgctctggactgctagaggaccctcgctgccatggctaccttctatgaagtcattgttcgcgttccatttgatgtggaagagcacctgcctggaatttctgacaactttgtagactgggtaactggtcaaatttgggagctgcctcccgagtcagatttgaatttgactctgattgagcagcctcagctgacggtggctgacagaattcgccgcgtgttcctgtacgagtggaacaaattttccaagcaggagagcaaattctttgtgcagtttgaaaagggatctgaatattttcatctgcacacgctcgtggagacctccggcatctcttctatggtccttggccgctacgtgagtcagattcgcgcccagctggtgaaggtggtgttccagaacattgagccgcggattaacgactgggtcgccatcaccaaggtaaagaagggcggagccaataaggtggtggattctgggtatattcccgcctacctgctgccgaaggtccaaccagagcttcagtgggcgtggactaacctcgaagagtataaattggccgccctcaatctggaggagcgcaaacggctcgtcgctcagtttcagcttgagtcctcgcagcgctcgcaagaggcatcttcccagagggacgtttcggctgacccggtcatcaagagcaagacttcccagaaatacatggcgctggtaagctggctggtggaacatggcatcacttccgagaagcagtggattcaggagaatcaggagagctacctgtccttcaactccacgggaaactctcggagccagattaaagccgcgcttgacaacgcgtcaaaaattatgagtctgaccaaatctgcctcagactatctcgtgggacagactgttccagaggacatttctgaaaacagaatctggcagatttttgatctcaacggctacgacccggcatacgcgggctctgttctctacggctggtgcactcgcgcctttggaaagaggaacaccgtctggctgtatggacccgcgaccaccggaaagaccaacatcgcggaagccatctctcacaccgtgcccttttatggctgtgtgaactggactaatgagaactttccctttaatgactgtgtggaaaaaatgttgatctggtgggaggagggaaagatgaccagcaaggtggtggaacccgccaaggccatcttgggggggtctagagtacgagtggatcaaaaatgtaaatcctctgtacaagtagactctaccccggtgattatcacctccaatactaacatgtgtgtggtggtggatgggaactccacgacctttgaacaccagcagccgctggaagaccgcatgttcagatttgaactcatgcggcggctcccgccagattttggcaagattaccaagcaggaagtcaaagacttttttgcttgggcaaaggtcaaccaggtgccggtgactcacgagtttatggttcccaagaaagtggcgggaactgagagggcggagacttctagaaaacgcccactggatgacgtcaccaataccaactataaaagtccggagaagcgggcccggctctcagttgttcctgagacgcctcgcagttcagacgtgcctgtagagcccgctcctctgcgacctctcaactggtcttccaggtatgaatgcagatgtgactatcatgctaaatttgactctgtaacgggggaatgtgacgagtgtgaatatttgaatcggggcaaaaatggctgtatctttcataatgctacacattgtcaaatttgtcacgctgttcctccatgggaaaaggaaaatgtgtcagattttaatgattttgatgactgtaataaagagcagtaaataaagtgagtagtcatgtcttttgttgaccaccctccagattggttggaatcgatcggcgacggctttcgtgaatttctcggccttgaggcgggtcccccgaaacccaaggccaatcaacagaagcaagataacgctcgaggtcttgtgcttcctgggtacaagtatcttggtcctgggaacggccttgataagggcgatcctgtcaattttgctgacgaggttgcccgagagcacgacctctcctaccagaaacagcttgaggcgggcgataacccttacctcaagtacaaccacgcggacgcagagtttcaggagaaactcgcttctgacacttcttttgggggaaaccttgggaaggctgttttccaggctaaaaagaggattctcgaacctcttggcctggttgagacgccggataaaacggcgcctgcggcaaaaaagaggcctctagagcagagtcctcaagagccagactcctcgagcggagttggcaagaaaggcaaacagcctgccagaaagagactcaactttgacgacgaacctggagccggagacgggcctcccccagaaggaccatcttccggagctatgtctactgagactgaaatgcgtgcagcagctggcggaaatggtggcgatgcgggacaaggtgccgagggagtgggtaatgcctccggtgattggcattgcgattccacttggtcagagagccacgtcaccaccacctcaacccgcacctgggtcctgccgacctacaacaaccacctgtacctgcggctcggctcgagcaacgccagcgacaccttcaacggattctccaccccctggggatactttgactttaaccgcttccactgccacttctcgccaagagactggcaaaggctcatcaacaaccactggggactgcgccccaaaagcatgcaagtccgcatcttcaacatccaagttaaggaggtcacgacgtctaacggggagacgaccgtatccaacaacctcaccagcacggtccagatctttgcggacagcacgtacgagctcccgtacgtgatggatgcaggtcaggagggcagcttgcctcctttccccaacgacgtgttcatggtgcctcagtacgggtactgcggactggtaaccggaggcagctctcaaaaccagacagacagaaatgccttctactgtctggagtactttcccagccagatgctgagaaccggaaacaactttgagatggtgtacaagtttgaaaacgtgcccttccactccatgtacgctcacagccagagcctggataggctgatgaacccgctgctggaccagtacctgtgggagctccagtctaccacctctggaggaactctcaaccagggcaattcagccaccaactttgccaagctgaccaaaacaaacttttctggctaccgcaaaaactggctcccggggcccatgatgaagcagcagagattctccaagactgccagtcaaaactacaagattccccagggaagaaacaacagtctgctccattatgagaccagaactaccctcgacggaagatggagcaattttgccccgggaacggccatggcaaccgcagccaacgacgccaccgacttctctcaggcccagctcatctttgcggggcccaacatcaccggcaacaccaccacagatgccaataacctgatgttcacttcagaagatgaacttagggccaccaacccccgggacactgacctgtttggccacctggcaaccaaccagcaaaacgccaccaccgttcctaccgtagacgacgtggacggagtcggcgtgtacccgggaatggtgtggcaggacagagacatttactaccaagggcccatttgggccaaaattccacacacggatggacactttcacccgtctcctctcattggcggatttggactgaaaagcccgcctccacaaatattcatcaaaaacactcctgtacccgccaatcccgcaacgaccttctctccggccagaatcaacagcttcatcacccagtacagcaccggacaggtggctgtcaaaatagaatgggaaatccagaaggagcggtccaagagatggaacccagaggtccagttcacgtccaactacggagcacaggactcgcttctctgggctcccgacaacgccggagcctacaaagagcccagggccattggatcccgatacctcaccaaccacctctagcccaattctgttgcataccctcaataaaccgtgtattcgtttcagtaaaatactgcctcttgtggtcattcggcgtacaacagcttacaacaacaacaaaacccccttgctagagagtgtggcactcccccccctgtcgcgttcgctcgttcgctggctcgattgggggggtggcagctcaaagagctgccagacgacggccctctgggccgtcgcccccccaatcgagccagcgaacgagcgaacgcgacaggggggggagtgccac

SEQ ID NO: 528 - protein, 390 aa, Bovine adeno-associated virus
MALVSWLVEHGITSEKQWIQENQESYLSFNSTGNSRSQIKAALDNASKIMSLTKSASDYLVGQTVPEDISENRIWQIFDLNGYDPAYAGSVLYGWCTRAFGKRNTVWLYGPATTGKTNIAEAISHTVPFYGCVNWTNENFPFNDCVEKMLIWWEEGKMTSKVVEPAKAILGGSRVRVDQKCKSSVQVDSTPVIITSNTNMCVVVDGNSTTFEHQQPLEDRMFRFELMRRLPPDFGKITKQEVKDFFAWAKVNQVPVTHEFMVPKKVAGTERAETSRKRPLDDVTNTNYKSPEKRARLSVVPETPRSSDVPVEPAPLRPLNWSSRYECRCDYHAKFDSVTGECDECEYLNRGKNGCIFHNATHCQICHAVPPWEKENVSDFNDFDDCNKEQ

SEQ ID NO: 529 - protein, 610 aa, Bovine adeno-associated virus
MATFYEVIVRVPFDVEEHLPGISDNFVDWVTGQIWELPPESDLNLTLIEQPQLTVADRIRRVFLYEWNKFSKQESKFFVQFEKGSEYFHLHTLVETSGISSMVLGRYVSQIRAQLVKVVFQNIEPRINDWVAITKVKKGGANKVVDSGYIPAYLLPKVQPELQWAWTNLEEYKLAALNLEERKRLVAQFQLESSQRSQEASSQRDVSADPVIKSKTSQKYMALVSWLVEHGITSEKQWIQENQESYLSFNSTGNSRSQIKAALDNASKIMSLTKSASDYLVGQTVPEDISENRIWQIFDLNGYDPAYAGSVLYGWCTRAFGKRNTVWLYGPATTGKTNIAEAISHTVPFYGCVNWTNENFPFNDCVEKMLIWWEEGKMTSKVVEPAKAILGGSRVRVDQKCKSSVQVDSTPVIITSNTNMCVVVDGNSTTFEHQQPLEDRMFRFELMRRLPPDFGKITKQEVKDFFAWAKVNQVPVTHEFMVPKKVAGTERAETSRKRPLDDVTNTNYKSPEKRARLSVVPETPRSSDVPVEPAPLRPLNWSSRYECRCDYHAKFDSVTGECDECEYLNRGKNGCIFHNATHCQICHAVPPWEKENVSDFNDFDDCNKEQ

SEQ ID NO: 530 - protein, 538 aa, Bovine adeno-associated virus
MRAAAGGNGGDAGQGAEGVGNASGDWHCDSTWSESHVTTTSTRTWVLPTYNNHLYLRLGSSNASDTFNGFSTPWGYFDFNRFHCHFSPRDWQRLINNHWGLRPKSMQVRIFNIQVKEVTTSNGETTVSNNLTSTVQIFADSTYELPYVMDAGQEGSLPPFPNDVFMVPQYGYCGLVTGGSSQNQTDRNAFYCLEYFPSQMLRTGNNFEMVYKFENVPFHSMYAHSQSLDRLMNPLLDQYLWELQSTTSGGTLNQGNSATNFAKLTKTNFSGYRKNWLPGPMMKQQRFSKTASQNYKIPQGRNNSLLHYETRTTLDGRWSNFAPGTAMATAANDATDFSQAQLIFAGPNITGNTTTDANNLMFTSEDELRATNPRDTDLFGHLATNQQNATTVPTVDDVDGVGVYPGMVWQDRDIYYQGPIWAKIPHTDGHFHPSPLIGGFGLKSPPPQIFIKNTPVPANPATTFSPARINSFITQYSTGQVAVKIEWEIQKERSKRWNPEVQFTSNYGAQDSLLWAPDNAGAYKEPRAIGSRYLTNHL

SEQ ID NO: 531 - protein, 736 aa, Artificial Sequence
  source: /note="Description of Artificial Sequence: Synthetic polypeptide"
MSFVDHPPDWLESIGDGFREFLGLEAGPPKPKANQQKQDNARGLVLPGYKYLGPGNGLDKGDPVNFADEVAREHDLSYQKQLEAGDNPYLKYNHADAEFQEKLASDTSFGGNLGKAVFQAKKRILEPLGLVETPDKTAPAAKKRPLEQSPQEPDSSSGVGKKGKQPARKRLNFDDEPGAGDGPPPEGPSSGAMSTETEMRAAAGGNGGDAGQGAEGVGNASGDWHCDSTWSESHVTTTSTRTWVLPTYNNHLYLRLGSSNASDTFNGFSTPWGYFDFNRFHCHFSPRDWQRLINNHWGLRPKSMQVRIFNIQVKEVTTSNGETTVSNNLTSTVHIFADSTYELPYVMDAGQEGSLPPFPNDVFMVPQYGYCGLVTGGSSQNQTDRNAFYCLEYFPSQMLRTGNNFEMVYKFENVPFHSMYAHSQSLDRLMNPLLDQYLWELQSTTSGGTLNQGNSATNFAKLTNKNFSGYRKNWLPGPMMKQQRFSKTASQNYKIPQGGNNSLLHYETRTTLDRRWSNFAPGTAMATAANDATDFSQAQLIFAGPNITGNTTTDANNLMFTSEDELRATNPRDTDLFGHLATNQQNATTVPTVDDVDGVGVYPGMVWQDRDIYYQGPIWAKIPHTDGHFHPSPLIGGFGLKSPPPQIFIKNTPVPANPATTFSPARINSFITQYSTGQVAVKIEWEIQKERSKRWNPEVQFTSNYGAQDSLLWAPDNAGAYKEPRAIGSRYLTNHL

SEQ ID NO: 532 - protein, 736 aa, Artificial Sequence
  source: /note="Description of Artificial Sequence: Synthetic polypeptide"
MSFVDHPPDWLESIGDGFREFLGLEAGPPKPKANQQKQDNARGLVLPGYKYLGPGNGLDKGDPVNFADEVAREHDLSYQKQLEAGDNPYLKYNHADAEFQEKLASDTSFGGNLGKAVFQAKKRILEPLGLVETPDKTAPAAKKRPLEQSPQEPDSSSGVGKKGKQPARKRLNFDDEPGAGDGPPPEGPSSGAMSTETEMRAAAGGNGGDAGQGAEGVGNASGDWHCDSTWSESHVTTTSTRTWVLPTYNNHLYLRLGSSNASDTFNGFSTPWGYFDFNRFHCHFSPRDWQRLINNHWGLRPKSMQVRIFNIQVKEVTTSNGETTVSNNLTSTVQIFADSTYELPYVMDAGQEGSLPPFPNDVFMVPQYGYCGLVTGGSSQNQTDRNAFYCLEYFPSQMLRTGNNFEMVYKFENVPFHSMYAHSQSLDRLMNPLLDQYLWELQSTTSGGTLNQGNSATNFAKLTKTNFSGYRKNWLPGPMMKQQRFSKTASQNYKIPQGRNNSLLHYETRTTLDGRWSNFAPGTAMATAANDATDFSQAQLIFAGPNITGNTTTDANNLMFTSEDELRATNPRDTDLFGHLATNQQNATTVPTVDDVDGVGVYPGMVWQDRDIYYQGPIWAKIPHTDGHFHPSPLIGGFGLKSPPPQIFIKNTPVPANPATTFSPARINSFITQYSTGQVAVKIEWEIQKERSKRWNPEVQFTSNYGAQDSLLWAPDNAGAYKEPRAIGSRYLTNHL

SEQ ID NO: 533 - protein, 736 aa, Bovine adeno-associated virus; identical to SEQ ID NO: 532

SEQ ID NO: 534 - protein, 600 aa, Bovine adeno-associated virus
TAPAAKKRPLEQSPQEPDSSSGVGKKGKQPARKRLNFDDEPGAGDGPPPEGPSSGAMSTETEMRAAAGGNGGDAGQGAEGVGNASGDWHCDSTWSESHVTTTSTRTWVLPTYNNHLYLRLGSSNASDTFNGFSTPWGYFDFNRFHCHFSPRDWQRLINNHWGLRPKSMQVRIFNIQVKEVTTSNGETTVSNNLTSTVQIFADSTYELPYVMDAGQEGSLPPFPNDVFMVPQYGYCGLVTGGSSQNQTDRNAFYCLEYFPSQMLRTGNNFEMVYKFENVPFHSMYAHSQSLDRLMNPLLDQYLWELQSTTSGGTLNQGNSATNFAKLTKTNFSGYRKNWLPGPMMKQQRFSKTASQNYKIPQGRNNSLLHYETRTTLDGRWSNFAPGTAMATAANDATDFSQAQLIFAGPNITGNTTTDANNLMFTSEDELRATNPRDTDLFGHLATNQQNATTVPTVDDVDGVGVYPGMVWQDRDIYYQGPIWAKIPHTDGHFHPSPLIGGFGLKSPPPQIFIKNTPVPANPATTFSPARINSFITQYSTGQVAVKIEWEIQKERSKRWNPEVQFTSNYGAQDSLLWAPDNAGAYKEPRAIGSRYLTNHL

SEQ ID NO: 535 - DNA, 2214 bp, Artificial Sequence
  source: /note="Description of Artificial Sequence: Synthetic polynucleotide"
atggctgccgatggttatcttccagattggctcgaggacactctctctgaaggaataagacagtggtggaagctcaaacctggcccaccaccaccaaagcccgcagagcggcataaggacgacagcaggggtcttgtgcttcctgggtacaagtacctcggacccttcaacggactcgacaagggagagccggtcaacgaggcagacgccgcggccctcgagcacgacaaagcctacgaccggcagctcgacagcggagacaacccgtacctcaagtacaaccacgccgacgcggagtttcaggagcgccttaaagaagatacgtcttttgggggcaacctcgggcgagcagtcttccaggccaaaaagaggcttcttgaacctcttggtctggttgaggaagcggctaagacggctcctggaaagaagaggcctgtagagcagtctcctcaggaaccggactcctcctcgggcatcggcaagacaggccagcagcccgctaaaaagagactcaatttcggtcagactggcgacacagagtcagtcccagaccctcaaccaatcggagaacctcccgcagccccctcaggtgtgggatctcttacaatggcttcaggtggtggcgcaccagtggcagacaataacgaaggtgccgatggagtgggtagttcctcgggaaattggcattgcgattcccaatggctgggggacagagtcatcaccaccagcacccgaacctgggccctgcccacctacaacaatcacctctacaagcaaatctccaacgggacatcgggaggagccaccaacgacaacacctacttcggctacagcaccccctgggggtattttgactttaacagattccactgccacttttcaccacgtgactggcagcgactcatcaacaacaactggggattccggcccaagagactcagcttcaagctcttcaacatccaggtcaaggaggtcacgcagaatgaaggcaccaagaccatcgccaataaccttaccagcacggtccaggtcttcacggactcggagtaccagctgccgtacgttctcggctctgcccaccagggctgcctgcctccgttcccggcggacgtgttcatgattccccagtacggctacctaacactcaacaacggtagtcaggccgtgggacgctcctccttctactgcctggaatactttccttcgcagatgctgagaaccggcaacaacttccagtttacttacaccttcgaggacgtgcctttccacagcagctacgcccacagccagagcttggaccggctgatgaatcctctgattgaccagtacctgtactacttgtctcggactcaaacaacaggaggcacggcaaatacgcagactctgggcttcagccaaggtgggcctaatacaatggccaatcaggcaaagaactggctgccaggaccctgttaccgccaacaacgcgtctcaacgacaaccgggcaaaacaacaatagcaactttgcctggactgctgggaccaaataccatctgaatggaagaaattcattggctaatcctggcatcgctatggcaacacacaaagacgacaaggagcgtttttttcccagtaacgggatcctgatttttggcaaacaaaatgctgccagagacaatgcggattacagcgatgtcatgctcaccagcgaggaagaaatcaaaaccactaaccctgtggctacagaggaatacggtatcgtggcagataacttgcagcagcaaaacacggctcctcaaattggaactgtcaacagccagggggccttacccggtatggtttggcagaaccgggacgtgtacctgcagggtcccatctgggccaagattcctcacacggacggcaacttccacccgtctccgctgatgggcggctttggcctgaaacatcctccgcctcagatcctgatcaagaacacgcctgtacctgcggatcctccgaccaccttcaaccagtcaaagctgaactctttcatcacgcaatacagcaccggacaggtcagcgtggaaattgaatgggagctgcagaaggaaaacagcaagcgctggaaccccgagatccagtacacctccaactactacaaatctacaagtgtggactttgctgttaatacagaaggcgtgtactctgaaccccaccccattggcacccgttacctcacccgtcccctgtaa

SEQ ID NO: 536 - protein, 737 aa, Artificial Sequence
  source: /note="Description of Artificial Sequence: Synthetic polypeptide"
MAADGYLPDWLEDTLSEGIRQWWKLKPGPPPPKPAERHKDDSRGLVLPGYKYLGPFNGLDKGEPVNEADAAALEHDKAYDRQLDSGDNPYLKYNHADAEFQERLKEDTSFGGNLGRAVFQAKKRLLEPLGLVEEAAKTAPGKKRPVEQSPQEPDSSSGIGKTGQQPAKKRLNFGQTGDTESVPDPQPIGEPPAAPSGVGSLTMASGGGAPVADNNEGADGVGSSSGNWHCDSQWLGDRVITTSTRTWALPTYNNHLYKQISNGTSGGATNDNTYFGYSTPWGYFDFNRFHCHFSPRDWQRLINNNWGFRPKRLSFKLFNIQVKEVTQNEGTKTIANNLTSTVQVFTDSEYQLPYVLGSAHQGCLPPFPADVFMIPQYGYLTLNNGSQAVGRSSFYCLEYFPSQMLRTGNNFQFTYTFEDVPFHSSYAHSQSLDRLMNPLIDQYLYYLSRTQTTGGTANTQTLGFSQGGPNTMANQAKNWLPGPCYRQQRVSTTTGQNNNSNFAWTAGTKYHLNGRNSLANPGIAMATHKDDKERFFPSNGILIFGKQNAARDNADYSDVMLTSEEEIKTTNPVATEEYGIVADNLQQQNTAPQIGTVNSQGALPGMVWQNRDVYLQGPIWAKIPHTDGNFHPSPLMGGFGLKHPPPQILIKNTPVPADPPTTFNQSKLNSFITQYSTGQVSVEIEWELQKENSKRWNPEIQYTSNYYKSTSVDFAVNTEGVYSEPHPIGTRYLTRPL

SEQ ID NO: 537 - protein, 736 aa, Artificial Sequence
  source: /note="Description of Artificial Sequence: Synthetic polypeptide"
MAADGYLPDWLEDNLSEGIREWWDLKPGAPKPKANQQKQDDGRGLVLPGYKYLGPFNGLDKGEPVNAADAAALEHDKAYDQQLKAGDNPYLRYNHADAEFQERLQEDTSFGGNLGRAVFQAKKRVLEPLGLVEEGAKTAPGKKRPVEQSPQEPDSSSGIGKTGQQPAKKRLNFGQTGDTESVPDPQPIGEPPAAPSGVGSLTMASGGGAPVADNNEGADGVGSSSGNWHCDSQWLGDRVITTSTRTWALPTYNNHLYKQISSASTGASNDNHYFGYSTPWGYFDFNRFHCHFSPRDWQRLINNNWGFRPKRLNFKLFNIQVKEVTDNNGVKTIANNLTSTVQVFTDSDYQLPYVLGSAHQGCLPPFPADVFMIPQYGYLTLNNGSQAVGRSSFYCLEYFPSQMLRTGNNFQFTYTFEDVPFHSSYAHSQSLDRLMNPLIDQYLYYLSRTQTTGGTANTQTLGFSQGGPNTMANQAKNWLPGPCYRQQRVSTTTGQNNNSNFAWTAGTKYHLNGRNSLANPGIAMATHKDDKERFFPSNGILIFGKQNAARDNADYSDVMLTSEEEIKTTNPVATEEYGIVADNLQQQNTAPQIGTVNSQGALPGMVWQNRDVYLQGPIWAKIPHTDGNFHPSPLMGGFGLKHPPPQILIKNTPVPADPPTTFNQSKLNSFITQYSTGQVSVEIEWELQKENSKRWNPEIQYTSNYYKSTSVDFAVNTEGVYSEPHPIGTRYLTRPL

SEQ ID NO: 538 - protein, 736 aa, Artificial Sequence
  source: /note="Description of Artificial Sequence: Synthetic polypeptide"
MAADGYLPDWLEDTLSEGIRQWWKLKPGPPPPKPAERHKDDSRGLVLPGYKYLGPFNGLDKGEPVNEADAAALEHDKAYDRQLDSGDNPYLKYNHADAEFQERLQGDTSFGGNLGRAVFQAKKRVLEPLGLVEEGAKTAPGKKRPVEQSPQEPDSSSGIGETGQQPAKKRLNFGQTGDSESVPDPQPLGEPPATPAAVGPTTMASGGGAPMADNNEGADGVGSSSGNWHCDSQWLGDRVITTSTRTWALPTYNNHLYKQISSASTGASNDNHYFGYSTPWGYFDFNRFHCHFSPRDWQRLINNNWGFRPKRLSFKLFNIQVKEVTDNNGVKTIANNLTSTVQVFTDSEYQLPYVLGSAHQGCLPPFPADVFMIPQYGYLTLNNGSQAVGRSSFYCLEYFPSQMLRTGNNFTFSYTFEDVPFHSSYAHSQSLDRLMNPLIDQYLYYLSRTQTTGGTANTQTLGFSQGGPNTMANQAKNWLPGPCYRQQRVSTTTGQNNNSNFAWTAGTKYHLNGRNSLANPGIAMATHKDDKERFFPSNGILIFGKQNAARDNADYSDVMLTSEEEIKTTNPVATEEYGIVADNLQQQNTAPQIGTVNSQGALPGMVWQNRDVYLQGPIWAKIPHTDGNFHPSPLMGGFGLKHPPPQILIKNTPVPADPPTTFNQSKLNSFITQYSTGQVSVEIEWELQKENSKRWNPEIQYTSNYYKSTSVDFAVNTEGVYSEPHPIGTRYLTRPL

SEQ ID NO: 539 - DNA, 2181 bp, Artificial Sequence
  source: /note="Description of Artificial Sequence: Synthetic polynucleotide"
atgtcttttgttgatcaccctccagattggttggaagaagttggtgaaggtcttcgcgagtttttgggccttgaagcgggcccaccgaaaccaaaacccaatcagcagcatcaagatcaagcccgtggtcttgtgctgcctggttataactatctcggacccggaaacggtctcgatcgaggagagcctgtcaacagggcagacgaggtcgcgcgagagcacgacatctcgtacaacgagcagcttgaggcgggagacaacccctacctcaagtacaaccacgcggacgccgagtttcaggagaagctcgccgacgacacatccttcgggggaaacctcggaaaggcagtctttcaggccaagaaaagggttctcgaaccttttggcctggttgaagagggtgctaagacggcccctaccggaaagcggatagacgaccactttccaaaaagaaagaaggctcggaccgaagaggactccaagccttccacctcgtcagacgccgaagctggacccagcggatcccagcagctgcaaatcccagcacaaccagcctcaagtttgggagctgatacaatgtctgcgggaggtggcggcccattgggcgacaataaccaaggtgccgatggagtgggcaatgcctcgggagattggcattgcgattccacgtggatgggggacagagtcgtcaccaagtccacccgcacctgggtgctgcccagctacaacaaccaccagtaccgagagatcaaaagcggctccgtcgacggaagcaacgccaacgcctactttggatacagcaccccctgggggtactttgactttaaccgcttccacagccactggagcccccgagactggcaaagactcatcaacaactattggggcttcagaccccggtctctcagagtcaaaatcttcaacatccaagtcaaagaggtcacggtgcaggactccaccaccaccatcgccaacaacctcacctccaccgtccaagtgtttacggacgacgactaccaactcccgtacgtcgtcggcaacgggaccgagggatgcctgccggccttccccccgcaggtctttacgctgccgcagtacggctacgcgacgctgaaccgagacaacggagacaacccgacagagcggagcagcttcttttgcctagagtactttcccagcaagatgctgaggacgggcaacaactttgagtttacctacagctttgaagaggtgcccttccactgcagcttcgccccgagccagaacctctttaagctggccaacccgctggtggaccagtacctgtaccgcttcgtgagcacctcggccacgggcgccatccagttccaaaagaacctggcgggcagatacgccaacacctacaaaaactggttcccggggcccatgggccgaacccagggctggaacacgagctctggggtcagcagcaccaacagagtcagcgtcaacaacttttccgtctcaaaccggatgaacctggagggggccagctaccaagtgaacccccagcccaacgggatgacaaacacgctccaaggcagcaaccgctacgcgctggaaaacaccatgatcttcaacgctcaaaacgccacgccgggaactacctcggtgtacccagaggacaatctactgctgaccagcgagagcgagactcagcccgtcaaccgggtggcttacaacacgggcggtcagatggccaccaacgcccagaacgccaccacggctcccacggtcgggacctacaacctccaggaagtgcttcctggcagcgtatggatggagagggacgtgtacctccaaggacccatctgggccaagatcccagagacgggggcgcactttcacccctctccggccatgggcggattcggactcaaacacccgccgcccatgatgctcatcaaaaacacgccggtgcccggcaacatcaccagcttctcggacgtgcccgtcagcagcttcatcacccagtacagcaccgggcaggtcaccgtggagatggaatgggagctcaaaaaggaaaactccaagaggtggaacccagagatccagtacaccaacaactacaacgacccccagtttgtggactttgctccagacggctccggcgaatacagaaccaccagagccatcggaacccgatacctcacccgacccctt

SEQ ID NO: 540 - protein, 726 aa, Artificial Sequence
  source: /note="Description of Artificial Sequence: Synthetic polypeptide"
MSFVDHPPDWLEEVGEGLREFLGLEAGPPKPKPNQQHQDQARGLVLPGYNYLGPGNGLDRGEPVNRADEVAREHDISYNEQLEAGDNPYLKYNHADAEFQEKLADDTSFGGNLGKAVFQAKKRVLEPFGLVEEGAKTAPTGKRIDDHFPKRKKARTEEDSKPSTSSDAEAGPSGSQQLQIPAQPASSLGADTMSAGGGGPLGDNNQGADGVGNASGDWHCDSTWMGDRVVTKSTRTWVLPSYNNHQYREIKSGSVDGSNANAYFGYSTPWGYFDFNRFHSHWSPRDWQRLINNYWGFRPRSLRVKIFNIQVKEVTVQDSTTTIANNLTSTVQVFTDDDYQLPYVVGNGTEGCLPAFPPQVFTLPQYGYATLNRDNGDNPTERSSFFCLEYFPSKMLRTGNNFEFTYSFEEVPFHCSFAPSQNLFKLANPLVDQYLYRFVSTSATGAIQFQKNLAGRYANTYKNWFPGPMGRTQGWNTSSGSSTNRVSVNNFSVSNRMNLEGASYQVNPQPNGMTNTLQGSNRYALENTMIFNAQNATPGTTSVYPEDNLLLTSESETQPVNRVAYNTGGQMATNAQNATTAPTVGTYNLQEVLPGSVWMERDVYLQGPIWAKIPETGAHFHPSPAMGGFGLKHPPPMMLIKNTPVPGNITSFSDVPVSSFITQYSTGQVTVEMEWELKKENSKRWNPEIQYTNNYNDPQFVDFAPDGSGEYRTTRAIGTRYLTRPL

SEQ ID NO: 541 - protein, 735 aa, Artificial Sequence
  source: /note="Description of Artificial Sequence: Synthetic polypeptide"
MAADGYLPDWLEDTLSEGIRQWWKLKPGPPPPKPAERHKDDSRGLVLPGYKYLGPFNGLDKGEPVNEADAAALEHDKAYDRQLDSGDNPYLKYNHADAEFQERLKEDTSFGGNLGRAVFQAKKRILEPLGLVEEPVKTAPGKKRPVEHSPAEPDSSSGTGKSGQQPARKRLNFGQTGDADSVPDPQPLGQPPAAPSGLGTNTMASGSGAPMADNNEGADGVGNSSGNWHCDSTWMGDRVITTSTRTWALPTYNNHLYKQISSQSGASNDNHYFGYSTPWGYFDFNRFHCHFSPRDWQRLINNNWGFRPKRLSFKLFNIQVKEVTQNDGTTTIANNLTSTVQVFTDSEYQLPYVLGSAHQGCLPPFPADVFMVPQYGYLTLNNGSQAVGRSSFYCLEYFPSQMLRTGNNFTFSYTFEDVPFHSSYAHSQSLDRLMNPLIDQYLYYLSRTNTPSGTTTMSRLQFSQAGASDIRDQSRNWLPGPCYRQQRVSKTAADNNNSDYSWTGATKYHLNGRDSLVNPGPAMASHKDDEEKYFPQSGVLIFGKQDSGKTNVDIEKVMITDEEEIRTTNPVATEQYGSVSTNLQSGNTQAATSDVNTQGVLPGMVWQDRDVYLQGPIWAKIPHTDGHFHPSPLMGGFGLKHPPPQILIKNTPVPANPSTTFSAAKFASFITQYSTGQVSVEIEWELQKENSKRWNPEIQYTSNYNKSVNVDFTVDTNGVYSEPRPIGTRYLTRNL

SEQ ID NO: 542 - DNA, 1797 bp, Artificial Sequence
  source: /note="Description of Artificial Sequence: Synthetic polynucleotide"
acggctccgaccggagacaagcggaaaggcgaagacgaacctcgtttgcccgacacttcttcacagactcccaagaaaaacaagaagcctcgcaaggaaagaccttccggcggggcagaagatccgggcgaaggcacctcttccaacgctggagcagcagcacccgcctctagtgtgggatcatctatcatggctgaaggaggtggcggcccagtgggcgatgcaggccagggtgccgatggagtgggcaattcctccggaaattggcattgcgattcccaatggctggaaaacggagtcgtcactcgaaccacccgaacctgggtcttgcccagctacaacaaccacctgtacaaacgaatccaaggacccagcggaggcgacaacaacaacaaattctttggattcagcaccccctggggatactttgactacaatcgattccactgccacttttccccgcgagactggcaacgactcatcaacaacaactggggcatccgtcccaaagcgatgcgctttagactctttaacatccaggttaaagaggtcacggtccaagacttcaacaccaccatcggcaacaacctcaccagtacggtccaggtctttgcggacaaggactaccaactgccgtacgtcctcggatcggctaccgaaggcaccttcccgccgttcccagcggatatctacacgatcccgcagtacgggtactgcacgctaaactacaacaacgaggcggtggatcgttcggccttctactgtctggactactttccctcagacatgctgcggacaggaaataactttgagtttacttacaccttcgaggacgttcctttccatagcatgtttgcccacaaccagacgctagaccggctgatgaatcccctcgtggatcagtacctctgggctttcagctccgtcagccaagcaggctcatctggacgagctcttcattactcgcgggcgactaaaaccaacatggcggctcaatataggaactggttacctgggcctttcttccgtgatcagcaaatctttacgggcgctagcaacatcactaaaaataacgtctttagcgtttgggaaaaaggcaagcaatgggaactcgacaatcggaccaacctaatgcagcccggtcctgcggcagcgaccacctttagcggagaacctgaccgtcaagccatgcaaaacacgctggcttttagcaggaccgtctacgatcaaacgaccgccacgaccgatcgtaaccagatactcatcaccaacgaagacgaaatcagacccaccaactcggtcggtatcgacgcgtggggagcagttcccaccaacaaccagtcgatcgtgacccccggcactcgcgcggccgtcaacaatcaaggggcgcttcccgggatggtgtggcaaaacagagacatttaccctacagggacccatttggccaaaattcccgacactgacaatcacttccatccgtccccgcttattgggcggtttggctgcaagcatccccctccccagattttcattaaaaacacacccgtccctgccaacccttcggaaacgttccagacggccaaagtggcctccttcatcaaccagtactcgaccggacagtgcaccgtcgaaatcttttgggaactcaagaaggaaacctccaagcgctggaaccccgaaatccagttcacctccaactttggcaacgcggccgacatccagtttgccgtctccgacacgggatcctattccgaacctcgtcccatcggtacccgttaccttaccaaacctctgtaa

SEQ ID NO: 543 - DNA, 1989 bp, Artificial Sequence
  source: /note="Description of Artificial Sequence: Synthetic polynucleotide"
atgaggtcgtactacgaggtcatcgttcagctgcccaacgacgtcgagagtcaggtacctggaatctccgattcgttcgtcaactggattacgtcgcgagaatggacgttgcctgaggacgccgattgggatttggaccaggtcgatcaagttcaactgacgctcggcgacaaaatccaacgggagattcgaactcattgggggacgatggccaaagaaccggactttcactattttatccaactggaacaaggtgaggtgttctttcatttacacgtcctgctggaaacgtgttccgtaaagccgatggtactcggaagatatatccgacatattcaacaaaaaattgtgagtaaagtctactgcgccacgagcctacgatggaaggatggatgcgtggtgaccaagaccaaaaatttcgggggcgcgaacaaggtccgggccgagtcgtatattcccgcctacctgatcccgaaacagcaaccggaagtgcagtgggcgtggactaacgtgcccgagtatataaaagcgtgcttgcaccgagaactgcgtgccagtctcgcgcgacttcacttcgaggaggcgggcgtctcgcaatccaaggaaaatctcgcgagaactgcagacggcgctcccgtgatgccgacccgcgtcagcaaacgctacatggagctcgtggattggctcgtggagaaggggatcaccaccgagaaggaatggctgctggaaaacagagaaagctttcggagctttcaggcctcgagcaactcggcgcgtcagatcaagacggccctgcaaggcgccattcaggagatgcttctgaccaagacggcggaggactacctcgtcggaaaggatcccgtctcggacgacgacatccgtcagaaccgcatctacaagattctggaactgaaccactacgacccagcgtacgtggggagtattttggtcgggtggtgccagaagaaatggggcaagcgaaacacgctgtggctgttcggacatgcgaccaccggcaagaccaacatcgcggaggctattgcccatgctgtgccgttctatggatgcgttaactggaccaacgagaactttccgttcaacgactgcgtcgaaaaaatgattatctggtgggaggagggcaaaatgaccgccaaagtggtggaaacagccaaggcgattctgggaggatctcgggtgagagtggaccaaaaatgcaaagcttcggttccgatcgaaccgacgccggtcattattaccagtaacaccaacatgtgttatgtcatcgacgggaacacgaccacgttcgagcataagcagccgttggaggacaggatgtttaagctcgaattgctgactcggttgcctgatgactttggtaaggtgaccaaacaggaggtgcgtcaattcttcaggtggtctcaggatcacctgacccctgtgatcccagaattcctagtgcggaaggcggagtctcgcaaaagacccgccccttccggggaaggctatataagcccgacaaagcggcccgcgctcgcagagcagcagcaggcgtcggagagcgcggacccggttcccaccaggtatcgtatcaaatgctcgaaacattgcggtatggataaaatgttgtttccttgccaaatttgtgaatcgatgaacagagatattaatatttgtgctattcataaaacgaccgactgtaaagagtgtttccccgactacggggataaagatgatgtagaactacccccctgtacagaacacaacgtgtctcgttgttatcaatgtcattcgggcgaattgtatcgcgtgacttcggactctgacgagaaacctgcccccgagagtgatgaaggcaccgagccatcctatgctccctgcacgattcaccacctgatgggcaagagtcacgggttagtcacttgcgcggcgtgtcggttgaaaaatagtacgttgcatgatgacttggatgacggtgatctcgaacaataa

SEQ ID NO: 544 - DNA, 1626 bp, Artificial Sequence
  source: /note="Description of Artificial Sequence: Synthetic polynucleotide"
atgaggtcgtactacgaggtcatcgttcagctgcccaacgacgtcgagagtcaggtacctggaatctccgattcgttcgtcaactggattacgtcgcgagaatggacgttgcctgaggacgccgattgggatttggaccaggtcgatcaagttcaactgacgctcggcgacaaaatccaacgggagattcgaactcattgggggacgatggccaaagaaccggactttcactattttatccaactggaacaaggtgaggtgttctttcatttacacgtcctgctggaaacgtgttccgtaaagccgatggtactcggaagatatatccgacatattcaacaaaaaattgtgagtaaagtctactgcgccacgagcctacgatggaaggatggatgcgtggtgaccaagaccaaaaatttcgggggcgcgaacaaggtccgggccgagtcgtatattcccgcctacctgatcccgaaacagcaaccggaagtgcagtgggcgtggactaacgtgcccgagtatataaaagcgtgcttgcaccgagaactgcgtgccagtctcgcgcgacttcacttcgaggaggcgggcgtctcgcaatccaaggaaaatctcgcgagaactgcagacggcgctcccgtgatgccgacccgcgtcagcaaacgctacatggagctcgtggattggctcgtggagaaggggatcaccaccgagaaggaatggctgctggaaaacagagaaagctttcggagctttcaggcctcgagcaactcggcgcgtcagatcaagacggccctgcaaggcgccattcaggagatgcttctgaccaagacggcggaggactacctcgtcggaaaggatcccgtctcggacgacgacatccgtcagaaccgcatctacaagattctggaactgaaccactacgacccagcgtacgtggggagtattttggtcgggtggtgccagaagaaatggggcaagcgaaacacgctgtggctgttcggacatgcgaccaccggcaagaccaacatcgcggaggctattgcccatgctgtgccgttctatggatgcgttaactggaccaacgagaactttccgttcaacgactgcgtcgaaaaaatgattatctggtgggaggagggcaaaatgaccgccaaagtggtggaaacagccaaggcgattctgggaggatctcgggtgagagtggaccaaaaatgcaaagcttcggttccgatcgaaccgacgccggtcattattaccagtaacaccaacatgtgttatgtcatcgacgggaacacgaccacgttcgagcataagcagccgttggaggacaggatgtttaagctcgaattgctgactcggttgcctgatgactttggtaaggtgaccaaacaggaggtgcgtcaattcttcaggtggtctcaggatcacctgacccctgtgatcccagaattcctagtgcggaaggcggagtctcgcaaaagacccgccccttccggggaaggctatataagcccgacaaagcggcccgcgctcgcagagcagcagcaggcgtcggagagcgcggacccggttcccaccagattggttggagcggttggtcaaaaagggagtgaatgctgcagctga

SEQ ID NO: 545 - DNA, 1323 bp, Artificial Sequence
  source: /note="Description of Artificial Sequence: Synthetic polynucleotide"
atggagctcgtggattggctcgtggagaaggggatcaccaccgagaaggaatggctgctggaaaacagagaaagctttcggagctttcaggcctcgagcaactcggcgcgtcagatcaagacggccctgcaaggcgccattcaggagatgcttctgaccaagacggcggaggactacctcgtcggaaaggatcccgtctcggacgacgacatccgtcagaaccgcatctacaagattctggaactgaaccactacgacccagcgtacgtggggagtattttggtcgggtggtgccagaagaaatggggcaagcgaaacacgctgtggctgttcggacatgcgaccaccggcaagaccaacatcgcggaggctattgcccatgctgtgccgttctatggatgcgttaactggaccaacgagaactttccgttcaacgactgcgtcgaaaaaatgattatctggtgggaggagggcaaaatgaccgccaaagtggtggaaacagccaaggcgattctgggaggatctcgggtgagagtggaccaaaaatgcaaagcttcggttccgatcgaaccgacgccggtcattattaccagtaacaccaacatgtgttatgtcatcgacgggaacacgaccacgttcgagcataagcagccgttggaggacaggatgtttaagctcgaattgctgactcggttgcctgatgactttggtaaggtgaccaaacaggaggtgcgtcaattcttcaggtggtctcaggatcacctgacccctgtgatcccagaattcctagtgcggaaggcggagtctcgcaaaagacccgccccttccggggaaggctatataagcccgacaaagcggcccgcgctcgcagagcagcagcaggcgtcggagagcgcggacccggttcccaccaggtatcgtatcaaatgctcgaaacattgcggtatggataaaatgttgtttccttgccaaatttgtgaatcgatgaacagagatattaatatttgtgctattcataaaacgaccgactgtaaagagtgtttccccgactacggggataaagatgatgtagaactacccccctgtacagaacacaacgtgtctcgttgttatcaatgtcattcgggcgaattgtatcgcgtgacttcggactctgacgagaaacctgcccccgagagtgatgaaggcaccgagccatcctatgctccctgcacgattcaccacctgatgggcaagagtcacgggttagtcacttgcgcggcgtgtcggttgaaaaatagtacgttgcatgatgacttggatgacggtgatctcgaacaataa

SEQ ID NO: 546 - DNA, 960 bp, Artificial Sequence
  source: /note="Description of Artificial Sequence: Synthetic polynucleotide"
atggagctcgtggattggctcgtggagaaggggatcaccaccgagaaggaatggctgctggaaaacagagaaagctttcggagctttcaggcctcgagcaactcggcgcgtcagatcaagacggccctgcaaggcgccattcaggagatgcttctgaccaagacggcggaggactacctcgtcggaaaggatcccgtctcggacgacgacatccgtcagaaccgcatctacaagattctggaactgaaccactacgacccagcgtacgtggggagtattttggtcgggtggtgccagaagaaatggggcaagcgaaacacgctgtggctgttcggacatgcgaccaccggcaagaccaacatcgcggaggctattgcccatgctgtgccgttctatggatgcgttaactggaccaacgagaactttccgttcaacgactgcgtcgaaaaaatgattatctggtgggaggagggcaaaatgaccgccaaagtggtggaaacagccaaggcgattctgggaggatctcgggtgagagtggaccaaaaatgcaaagcttcggttccgatcgaaccgacgccggtcattattaccagtaacaccaacatgtgttatgtcatcgacgggaacacgaccacgttcgagcataagcagccgttggaggacaggatgtttaagctcgaattgctgactcggttgcctgatgactttggtaaggtgaccaaacaggaggtgcgtcaattcttcaggtggtctcaggatcacctgacccctgtgatcccagaattcctagtgcggaaggcggagtctcgcaaaagacccgccccttccggggaaggctatataagcccgacaaagcggcccgcgctcgcagagcagcagcaggcgtcggagagcgcggacccggttcccaccagattggttggagcggttggtcaaaaagggagtgaatgctgcagctga

SEQ ID NO: 547 - DNA, 1608 bp, Artificial Sequence
  source: /note="Description of Artificial Sequence: Synthetic polynucleotide"
atggctgaaggaggtggcggcccagtgggcgatgcaggccagggtgccgatggagtgggcaattcctccggaaattggcattgcgattcccaatggctggaaaacggagtcgtcactcgaaccacccgaacctgggtcttgcccagctacaacaaccacctgtacaaacgaatccaaggacccagcggaggcgacaacaacaacaaattctttggattcagcaccccctggggatactttgactacaatcgattccactgccacttttccccgcgagactggcaacgactcatcaacaacaactggggcatccgtcccaaagcgatgcgctttagactctttaacatccaggttaaagaggtcacggtccaagacttcaacaccaccatcggcaacaacctcaccagtacggtccaggtctttgcggacaaggactaccaactgccgtacgtcctcggatcggctaccgaaggcaccttcccgccgttcccagcggatatctacacgatcccgcagtacgggtactgcacgctaaactacaacaacgaggcggtggatcgttcggccttctactgtctggactactttccctcagacatgctgcggacaggaaataactttgagtttacttacaccttcgaggacgttcctttccatagcatgtttgcccacaaccagacgctagaccggctgatgaatcccctcgtggatcagtacctctgggctttcagctccgtcagccaagcaggctcatctggacgagctcttcattactcgcgggcgactaaaaccaacatggcggctcaatataggaactggttacctgggcctttcttccgtgatcagcaaatctttacgggcgctagcaacatcactaaaaataacgtctttagcgtttgggaaaaaggcaagcaatgggaactcgacaatcggaccaacctaatgcagcccggtcctgcggcagcgaccacctttagcggagaacctgaccgtcaagccatgcaaaacacgctggcttttagcaggaccgtctacgatcaaacgaccgccacgaccgatcgtaaccagatactcatcaccaacgaagacgaaatcagacccaccaactcggtcggtatcgacgcgtggggagcagttcccaccaacaaccagtcgatcgtgacccccggcactcgcgcggccgtcaacaatcaaggggcgcttcccgggatggtgtggcaaaacagagacatttaccctacagggacccatttggccaaaattcccgacactgacaatcacttccatccgtccccgcttattgggcggtttggctgcaagcatccccctccccagattttcattaaaaacacacccgtccctgccaacccttcggaaacgttccagacggccaaagtggcctccttcatcaaccagtactcgaccggacagtgcaccgtcgaaatcttttgggaactcaagaaggaaacctccaagcgctggaaccccgaaatccagttcacctccaactttggcaacgcggccgacatccagtttgccgtctccgacacgggatcctattccgaacctcgtcccatcggtacccgttaccttaccaaacctctgtaa

SEQ ID NO: 548 - DNA, 2232 bp, Artificial Sequence
  source: /note="Description of Artificial Sequence: Synthetic polynucleotide"
atgtctctcatttctgatgcgattccagattggttggagcggttggtcaaaaagggagtgaatgctgcagctgatttctaccatttggaaagcggtcctcctcgtcctaaggcaaatcagcaaactcaagaatctcttgaaaaggacgattcgagaggtctcgtgttcccaggctacaattatctaggccctttcaacggtctagataaaggagaacccgtcaacgaggcagacgctgccgccttagaacacgacaaggcttacgacctcgaaatcaaggacgggcacaacccgtactttgagtacaacgaggccgacagacgtttccaggaacgtctcaaagacgatacctcctttggaggcaatttaggtaaagccatcttccaggccaaaaagagggttctcgaaccctttggtctggtggaagactcaaagacggctccgaccggagacaagcggaaaggcgaagacgaacctcgtttgcccgacacttcttcacagactcccaagaaaaacaagaagcctcgcaaggaaagaccttccggcggggcagaagatccgggcgaaggcacctcttccaacgctggagcagcagcacccgcctctagtgtgggatcatctatcatggctgaaggaggtggcggcccagtgggcgatgcaggccagggtgccgatggagtgggcaattcctccggaaattggcattgcgattcccaatggctggaaaacggagtcgtcactcgaaccacccgaacctgggtcttgcccagctacaacaaccacctgtacaaacgaatccaaggacccagcggaggcgacaacaacaacaaattctttggattcagcaccccctggggatactttgactacaatcgattccactgccacttttccccgcgagactggcaacgactcatcaacaacaactggggcatccgtcccaaagcgatgcgctttagactctttaacatccaggttaaagaggtcacggtccaagacttcaacaccaccatcggcaacaacctcaccagtacggtccaggtctttgcggacaaggactaccaactgccgtacgtcctcggatcggctaccgaaggcaccttcccgccgttcccagcggatatctacacgatcccgcagtacgggtactgcacgctaaactacaacaacgaggcggtggatcgttcggccttctactgtctggactactttccctcagacatgctgcggacaggaaataactttgagtttacttacaccttcgaggacgttcctttccatagcatgtttgcccacaaccagacgctagaccggctgatgaatcccctcgtggatcagtacctctgggctttcagctccgtcagccaagcaggctcatctggacgagctcttcattactcgcgggcgactaaaaccaacatggcggctcaatataggaactggttacctgggcctttcttccgtgatcagcaaatctttacgggcgctagcaacatcactaaaaataacgtctttagcgtttgggaaaaaggcaagcaatgggaactcgacaatcggaccaacctaatgcagcccggtcctgcggcagcgaccacctttagcggagaacctgaccgtcaagccatgcaaaacacgctggcttttagcaggaccgtctacgatcaaacgaccgccacgaccgatcgtaaccagatactcatcaccaacgaagacgaaatcagacccaccaactcggtcggtatcgacgcgtggggagcagttcccaccaacaaccagtcgatcgtgacccccggcactcgcgcggccgtcaacaatcaaggggcgcttcccgggatggtgtggcaaaacagagacatttaccctacagggacccatttggccaaaattcccgacactgacaatcacttccatccgtccccgcttattgggcggtttggctgcaagcatccccctccccagattttcattaaaaacacacccgtccctgccaacccttcggaaacgttccagacggccaaagtggcctccttcatcaaccagtactcgaccggacagtgcaccgtcgaaatcttttgggaactcaagaaggaaacctccaagcgctggaaccccgaaatccagttcacctccaactttggcaacgcggccgacatccagtttgccgtctccgacacgggatcctattccgaacctcgtcccatcggtacccgttaccttaccaaacctctgtaa

SEQ ID NO: 549 - protein, 535 aa, Artificial Sequence
  source: /note="Description of Artificial Sequence: Synthetic polypeptide"
MAEGGGGPVGDAGQGADGVGNSSGNWHCDSQWLENGVVTRTTRTWVLPSYNNHLYKRIQGPSGGDNNNKFFGFSTPWGYFDYNRFHCHFSPRDWQRLINNNWGIRPKAMRFRLFNIQVKEVTVQDFNTTIGNNLTSTVQVFADKDYQLPYVLGSATEGTFPPFPADIYTIPQYGYCTLNYNNEAVDRSAFYCLDYFPSDMLRTGNNFEFTYTFEDVPFHSMFAHNQTLDRLMNPLVDQYLWAFSSVSQAGSSGRALHYSRATKTNMAAQYRNWLPGPFFRDQQIFTGASNITKNNVFSVWEKGKQWELDNRTNLMQPGPAAATTFSGEPDRQAMQNTLAFSRTVYDQTTATTDRNQILITNEDEIRPTNSVGIDAWGAVPTNNQSIVTPGTRAAVNNQGALPGMVWQNRDIYPTGTHLAKIPDTDNHFHPSPLIGRFGCKHPPPQIFIKNTPVPANPSETFQTAKVASFINQYSTGQCTVEIFWELKKETSKRWNPEIQFTSNFGNAADIQFAVSDTGSYSEPRPIGTRYLTKPL

SEQ ID NO: 550 - protein, 440 aa, Artificial Sequence
  source: /note="Description of Artificial Sequence: Synthetic polypeptide"
MELVDWLVEKGITTEKEWLLENRESFRSFQASSNSARQIKTALQGAIQEMLLTKTAEDYLVGKDPVSDDDIRQNRIYKILELNHYDPAYVGSILVGWCQKKWGKRNTLWLFGHATTGKTNIAEAIAHAVPFYGCVNWTNENFPFNDCVEKMIIWWEEGKMTAKVVETAKAILGGSRVRVDQKCKASVPIEPTPVIITSNTNMCYVIDGNTTTFEHKQPLEDRMFKLELLTRLPDDFGKVTKQEVRQFFRWSQDHLTPVIPEFLVRKAESRKRPAPSGEGYISPTKRPALAEQQQASESADPVPTRYRIKCSKHCGMDKMLFPCQICESMNRDINICAIHKTTDCKECFPDYGDKDDVELPPCTEHNVSRCYQCHSGELYRVTSDSDEKPAPESDEGTEPSYAPCTIHHLMGKSHGLVTCAACRLKNSTLHDDLDDGDLEQ

SEQ ID NO: 551 - protein, 319 aa, Artificial Sequence
  source: /note="Description of Artificial Sequence: Synthetic polypeptide"
MELVDWLVEKGITTEKEWLLENRESFRSFQASSNSARQIKTALQGAIQEMLLTKTAEDYLVGKDPVSDDDIRQNRIYKILELNHYDPAYVGSILVGWCQKKWGKRNTLWLFGHATTGKTNIAEAIAHAVPFYGCVNWTNENFPFNDCVEKMIIWWEEGKMTAKVVETAKAILGGSRVRVDQKCKASVPIEPTPVIITSNTNMCYVIDGNTTTFEHKQPLEDRMFKLELLTRLPDDFGKVTKQEVRQFFRWSQDHLTPVIPEFLVRKAESRKRPAPSGEGYISPTKRPALAEQQQASESADPVPTRLVGAVGQKGSECCS

SEQ ID NO: 552 - protein, 662 aa, Artificial Sequence
  source: /note="Description of Artificial Sequence: Synthetic polypeptide"
MRSYYEVIVQLPNDVESQVPGISDSFVNWITSREWTLPEDADWDLDQVDQVQLTLGDKIQREIRTHWGTMAKEPDFHYFIQLEQGEVFFHLHVLLETCSVKPMVLGRYIRHIQQKIVSKVYCATSLRWKDGCVVTKTKNFGGANKVRAESYIPAYLIPKQQPEVQWAWTNVPEYIKACLHRELRASLARLHFEEAGVSQSKENLARTADGAPVMPTRVSKRYMELVDWLVEKGITTEKEWLLENRESFRSFQASSNSARQIKTALQGAIQEMLLTKTAEDYLVGKDPVSDDDIRQNRIYKILELNHYDPAYVGSILVGWCQKKWGKRNTLWLFGHATTGKTNIAEAIAHAVPFYGCVNWTNENFPFNDCVEKMIIWWEEGKMTAKVVETAKAILGGSRVRVDQKCKASVPIEPTPVIITSNTNMCYVIDGNTTTFEHKQPLEDRMFKLELLTRLPDDFGKVTKQEVRQFFRWSQDHLTPVIPEFLVRKAESRKRPAPSGEGYISPTKRPALAEQQQASESADPVPTRYRIKCSKHCGMDKMLFPCQICESMNRDINICAIHKTTDCKECFPDYGDKDDVELPPCTEHNVSRCYQCHSGELYRVTSDSDEKPAPESDEGTEPSYAPCTIHHLMGKSHGLVTCAACRLKNSTLHDDLDDGDLEQ

SEQ ID NO: 553 - protein, 541 aa, Artificial Sequence
  source: /note="Description of Artificial Sequence: Synthetic polypeptide"
MRSYYEVIVQLPNDVESQVPGISDSFVNWITSREWTLPEDADWDLDQVDQVQLTLGDKIQREIRTHWGTMAKEPDFHYFIQLEQGEVFFHLHVLLETCSVKPMVLGRYIRHIQQKIVSKVYCATSLRWKDGCVVTKTKNFGGANKVRAESYIPAYLIPKQQPEVQWAWTNVPEYIKACLHRELRASLARLHFEEAGVSQSKENLARTADGAPVMPTRVSKRYMELVDWLVEKGITTEKEWLLENRESFRSFQASSNSARQIKTALQGAIQEMLLTKTAEDYLVGKDPVSDDDIRQNRIYKILELNHYDPAYVGSILVGWCQKKWGKRNTLWLFGHATTGKTNIAEAIAHAVPFYGCVNWTNENFPFNDCVEKMIIWWEEGKMTAKVVETAKAILGGSRVRVDQKCKASVPIEPTPVIITSNTNMCYVIDGNTTTFEHKQPLEDRMFKLELLTRLPDDFGKVTKQEVRQFFRWSQDHLTPVIPEFLVRKAESRKRPAPSGEGYISPTKRPALAEQQQASESADPVPTRLVGAVGQKGSECCS

SEQ ID NO: 554 - protein, 743 aa, Artificial Sequence
  source: /note="Description of Artificial Sequence: Synthetic polypeptide"
MSLISDAIPDWLERLVKKGVNAAADFYHLESGPPRPKANQQTQESLEKDDSRGLVFPGYNYLGPFNGLDKGEPVNEADAAALEHDKAYDLEIKDGHNPYFEYNEADRRFQERLKDDTSFGGNLGKAIFQAKKRVLEPFGLVEDSKTAPTGDKRKGEDEPRLPDTSSQTPKKNKKPRKERPSGGAEDPGEGTSSNAGAAAPASSVGSSIMAEGGGGPVGDAGQGADGVGNSSGNWHCDSQWLENGVVTRTTRTWVLPSYNNHLYKRIQGPSGGDNNNKFFGFSTPWGYFDYNRFHCHFSPRDWQRLINNNWGIRPKAMRFRLFNIQVKEVTVQDFNTTIGNNLTSTVQVFADKDYQLPYVLGSATEGTFPPFPADIYTIPQYGYCTLNYNNEAVDRSAFYCLDYFPSDMLRTGNNFEFTYTFEDVPFHSMFAHNQTLDRLMNPLVDQYLWAFSSVSQAGSSGRALHYSRATKTNMAAQYRNWLPGPFFRDQQIFTGASNITKNNVFSVWEKGKQWELDNRTNLMQPGPAAATTFSGEPDRQAMQNTLAFSRTVYDQTTATTDRNQILITNEDEIRPTNSVGIDAWGAVPTNNQSIVTPGTRAAVNNQGALPGMVWQNRDIYPTGTHLAKIPDTDNHFHPSPLIGRFGCKHPPPQIFIKNTPVPANPSETFQTAKVASFINQYSTGQCTVEIFWELKKETSKRWNPEIQFTSNFGNAADIQFAVSDTGSYSEPRPIGTRYLTKPL

SEQ ID NO: 555 - protein, 598 aa, Artificial Sequence
  source: /note="Description of Artificial Sequence: Synthetic polypeptide"
TAPTGDKRKGEDEPRLPDTSSQTPKKNKKPRKERPSGGAEDPGEGTSSNAGAAAPASSVGSSIMAEGGGGPVGDAGQGADGVGNSSGNWHCDSQWLENGVVTRTTRTWVLPSYNNHLYKRIQGPSGGDNNNKFFGFSTPWGYFDYNRFHCHFSPRDWQRLINNNWGIRPKAMRFRLFNIQVKEVTVQDFNTTIGNNLTSTVQVFADKDYQLPYVLGSATEGTFPPFPADIYTIPQYGYCTLNYNNEAVDRSAFYCLDYFPSDMLRTGNNFEFTYTFEDVPFHSMFAHNQTLDRLMNPLVDQYLWAFSSVSQAGSSGRALHYSRATKTNMAAQYRNWLPGPFFRDQQIFTGASNITKNNVFSVWEKGKQWELDNRTNLMQPGPAAATTFSGEPDRQAMQNTLAFSRTVYDQTTATTDRNQILITNEDEIRPTNSVGIDAWGAVPTNNQSIVTPGTRAAVNNQGALPGMVWQNRDIYPTGTHLAKIPDTDNHFHPSPLIGRFGCKHPPPQIFIKNTPVPANPSETFQTAKVASFINQYSTGQCTVEIFWELKKETSKRWNPEIQFTSNFGNAADIQFAVSDTGSYSEPRPIGTRYLTKPL

SEQ ID NO: 556 - DNA, 4694 bp, Artificial Sequence
  source: /note="Description of Artificial Sequence: Synthetic polynucleotide"
tggccagtttccaagacaggctcgctcgctcactcgggccggggccccaaaggggcccctagcgaccgcttcgcggtcgcggcccgagtgagcgagcgagcctgtcttggaaactggccagcactccggtgaggtaatgccgtcacgtggtcgggaatgggaacgggaaatctcgcgagaacgtaaacaaatataagacggcgccacacggcgctgcgtcatacgcgcgcgcgcaccggcgagatgaggtcgtactacgaggtcatcgttcagctgcccaacgacgtcgagagtcaggtacctggaatctccgattcgttcgtcaactggattacgtcgcgagaatggacgttgcctgaggacgccgattgggatttggaccaggtcgatcaagttcaactgacgctcggcgacaaaatccaacgggagattcgaactcattgggggacgatggccaaagaaccggactttcactattttatccaactggaacaaggtgaggtgttctttcatttacacgtcctgctggaaacgtgttccgtaaagccgatggtactcggaagatatatccgacatattcaacaaaaaattgtgagtaaagtctactgcgccacgagcctacgatggaaggatggatgcgtggtgaccaagaccaaaaatttcgggggcgcgaacaaggtccgggccgagtcgtatattcccgcctacctgatcccgaaacagcaaccggaagtgcagtgggcgtggactaacgtgcccgagtatataaaagcgtgcttgcaccgagaactgcgtgccagtctcgcgcgacttcacttcgaggaggcgggcgtctcgcaatccaaggaaaatctcgcgagaactgcagacggcgctcccgtgatgccgacccgcgtcagcaaacgctacatggagctcgtggattggctcgtggagaaggggatcaccaccgagaaggaatggctgctggaaaacagagaaagctttcggagctttcaggcctcgagcaactcggcgcgtcagatcaagacggccctgcaaggcgccattcaggagatgcttctgaccaagacggcggaggactacctcgtcggaaaggatcccgtctcggacgacgacatccgtcagaaccgcatctacaagattctggaactgaaccactacgacccagcgtacgtggggagtattttggtcgggtggtgccagaagaaatggggcaagcgaaacacgctgtggctgttcggacatgcgaccaccggcaagaccaacatcgcggaggctattgcccatgctgtgccgttctatggatgcgttaactggaccaacgagaactttccgttcaacgactgcgtcgaaaaaatgattatctggtgggaggagggcaaaatgaccgccaaagtggtggaaacagccaaggcgattctgggaggatctcgggtgagagtggaccaaaaatgcaaagcttcggttccgatcgaaccgacgccggtcattattaccagtaacaccaacatgtgttatgtcatcgacgggaacacgaccacgttcgagcataagcagccgttggaggacaggatgtttaagctcgaattgctgactcggttgcctgatgactttggtaaggtgaccaaacaggaggtgcgtcaattcttcaggtggtctcaggatcacctgacccctgtgatcccagaattcctagtgcggaaggcggagtctcgcaaaagacccgccccttccggggaaggctatataagcccgacaaagcggcccgcgctcgcagagcagcagcaggcgtcggagagcgcggacccggttcccaccaggtatcgtatcaaatgctcgaaacattgcggtatggataaaatgttgtttccttgccaaatttgtgaatcgatgaacagagatattaatatttgtgctattcataaaacgaccgactgtaaagagtgtttccccgactacggggataaagatgatgtagaactacccccctgtacagaacacaacgtgtctcgttgttatcaatgtcattcgggcgaattgtatcgcgtgacttcggactctgacgagaaacctgcccccgagagtgatgaaggcaccgagccatcctatgctccctgcacgattcaccacctgatgggcaagagtcacgggttagtcacttgcgcggcgtgtcggttgaaaaatagtacgttgcatgatgacttggatgacggtgatctcgaacaataaatgattgaaatgtagccatgtctctcatttctgatgcgattccagattggttggagcggttggtcaaaaagggagtgaatgctgcagctgatttctaccatttggaaagcggtcctcctcgtcctaaggcaaatcagcaaactcaagaatctcttgaaaaggacgattcgagaggtctcgtgttcccaggctacaattatctaggccctttcaacggtctagataaaggagaacccgtcaacgaggcagacgctgccgccttagaacacgacaaggcttacgacctcgaaatcaaggacgggcacaacccgtactttgagtacaacgaggccgacagacgtttccaggaacgtctcaaagacgatacctcctttggaggcaatttaggtaaagccatcttccaggccaaaaagagggttctcgaaccctttggtctggtggaagactcaaagacggctccgaccggagacaagcggaaaggcgaagacgaacctcgtttgcccgacacttcttcacagactcccaagaaaaacaagaagcctcgcaaggaaagaccttccggcggggcagaagatccgggcgaaggcacctcttccaacgctggagcagcagcacccgcctctagtgtgggatcatctatcatggctgaaggaggtggcggcccagtgggcgatgcaggccagggtgccgatggagtgggcaattcctccggaaattggcattgcgattcccaatggctggaaaacggagtcgtcactcgaaccacccgaacctgggtcttgcccagctacaacaaccacctgtacaaacgaatccaaggacccagcggaggcgacaacaacaacaaattctttggattcagcaccccctggggatactttgactacaatcgattccactgccacttttccccgcgagactggcaacgactcatcaacaacaactggggcatccgtcccaaagcgatgcgctttagactctttaacatccaggttaaagaggtcacggtccaagacttcaacaccaccatcggcaacaacctcaccagtacggtccaggtctttgcggacaaggactaccaactgccgtacgtcctcggatcggctaccgaaggcaccttcccgccgttcccagcggatatctacacgatcccgcagtacgggtactgcacgctaaactacaacaacgaggcggtggatcgttcggccttctactgtctggactactttccctcagacatgctgcggacaggaaataactttgagtttacttacaccttcgaggacgttcctttccatagcatgtttgcccacaaccagacgctagaccggctgatgaatcccctcgtggatcagtacctctgggctttcagctccgtcagccaagcaggctcatctggacgagctcttcattactcgcgggcgactaaaaccaacatggcggctcaatataggaactggttacctgggcctttcttccgtgatcagcaaatctttacgggcgctagcaacatcactaaaaataacgtctttagcgtttgggaaaaaggcaagcaatgggaactcgacaatcggaccaacctaatgcagcccggtcctgcggcagcgaccacctttagcggagaacctgaccgtcaagccatgcaaaacacgctggcttttagcaggaccgtctacgatcaaacgaccgccacgaccgatcgtaaccagatactcatcaccaacgaagacgaaatcagacccaccaactcggtcggtatcgacgcgtggggagcagttcccaccaacaaccagtcgatcgtgacccccggcactcgcgcggccgtcaacaatcaaggggcgcttcccgggatggtgtggcaaaacagagacatttaccctacagggacccatttggccaaaattcccgacactgacaatcacttccatccgtccccgcttattgggcggtttggctgcaagcatccccctccccagattttcattaaaaacacacccgtccctgccaacccttcggaaacgttccagacggccaaagtggcctccttcatcaaccagtactcgaccggacagtgcaccgtcgaaatcttttgggaactcaagaaggaaacctccaagcgctggaaccccgaaatccagttcacctccaactttggcaacgcggccgacatccagtttgccgtctccgacacgggatcctattccgaacctcgtcccatcggtacccgttaccttaccaaacctctgtaaattaaacccttcaataaaccgtttatgcgtaactgtatttccgtctcctgtcgttattcagtcacatgatgcggcattacctcaccggagtgctggccagtttccaagacaggctcgctcgctcactcgggccggggccccaaaggggcccctagcgaccgcttcgcggtcgcggcccgagtgagcgagcgagcctgtcttggaaactggcca

SEQ ID NO: 557 - DNA, 2211 bp, Artificial Sequence
  source: /note="Description of Artificial Sequence: Synthetic polynucleotide"
atggctgctgatggttatcttccagattggctcgaggacactctctctgaaggaataagacagtggtggaagctcaaacctggcccaccaccaccaaagcccgcagagcggcataaggacgacagcaggggtcttgtgcttcctgggtacaagtacctcggacccttcaacggactcgacaagggagagccggtcaacgaggcagacgcagcggccctcgagcacgacaaggcctacgaccagcagctcaaggccggtgacaacccctacctcaagtacaaccacgccgacgcggagttccagcagcggcttcagggcgacacatcgtttgggggcaacctcggcagagcagtcttccaggccaaaaagagggttcttgaacctcttggtctggttgagcaagcgggtgagacggctcctggaaagaagagaccgttgattgaatccccccagcagcccgactcctccacgggtatcggcaaaaaaggcaagcagccggctaaaaagagactcaattttggtcagactggcgactcagagtcagtccccgacccacaacctctcggagaacctccagcaacccccgctgctgtgggacctactacaatggcttcaggtggtggcgcaccaatggcagacaataacgaaggcgccgacggagtgggtaatgcctcaggaaattggcattgcgattccacatggctgggcgacagagtcatcaccaccagcacccgcacctgggccttgcccacctacaataaccacctctacaagcaaatctccagtgcttcaacgggggccagcaacgacaaccactacttcggctacagcaccccctgggggtattttgacttcaacagattccactgccacttttcaccacgtgactggcagcgactcatcaacaacaattggggattccggcccaagagactcaacttcaaactcttcaacatccaagtcaaggaggtcacgacgaatgatggcgtcacaaccatcgctaataaccttaccagcacggttcaagtcttctcggactcagactatcagctcccgtacgtgctcgggtcggctcacgagggctgcctcccgccgttcccagcagacgtcttcatggtgccacagtatggatacctcaccctgaacaacgggagtcaggcagtaggacgctcttcattttactgcctggagtactttccttctcagatgctgcgtaccggaaacaactttaccttcagctacacttttgaggacgttcctttccacagcagctacgctcacagccagagtctggaccgtctcatgaatcctctcatcgaccagtacctgtattacctgaacagaactcagaatcagtccggaagtgcccaaaacaaggacttgctgtttagccgggggtctccagctggcatgtctgttcagcccaaaaactggctacctggaccctgttatcggcagcagcgcgtttctaaaacaaaaacagacaacaacaacagcaactttacctggactggtgcttcaaaatataaccttaatgggcgtgaatctataatcaaccctggcactgctatggcctcacacaaagacgacaaagacaagttctttcccatgagcggtgtcatgatttttggaaaggagagcgccggagcttcaaacactgcattggacaatgtcatgatcacagacgaagaggaaatcaaagccactaaccccgtggccaccgaaagatttgggactgtggcagtcaatctccagagcagcagcacagaccctgcgaccggagatgtgcatgttatgggagccttacctggaatggtgtggcaagacagagacgtatacctgcagggtcccatttgggccaaaattcctcacacagatggacactttcacccgtctcctcttatgggcggctttggactcaagaacccgcctcctcagatcctcatcaaaaacacgcctgttcctgcgaatcctccggcggagttttcagctacaaagtttgcttcattcatcacccaatactccacaggacaagtgagtgtggaaattgaatgggagctgcagaaagaaaacagcaagcgctggaatcccgaagtgcagtacacatccaattatgcaaaatctgccaacgttgattttactgtggacaacaatggactttatactgagcctcgccccattggcacccgttacctcacccgtcccctgtaa

SEQ ID NO: 558 - protein, 736 aa, Artificial Sequence
  source: /note="Description of Artificial Sequence: Synthetic polypeptide"
MAADGYLPDWLEDTLSEGIRQWWKLKPGPPPPKPAERHKDDSRGLVLPGYKYLGPFNGLDKGEPVNEADAAALEHDKAYDQQLKAGDNPYLKYNHADAEFQQRLQGDTSFGGNLGRAVFQAKKRVLEPLGLVEQAGETAPGKKRPLIESPQQPDSSTGIGKKGKQPAKKRLNFGQTGDSESVPDPQPLGEPPATPAAVGPTTMASGGGAPMADNNEGADGVGNASGNWHCDSTWLGDRVITTSTRTWALPTYNNHLYKQISSASTGASNDNHYFGYSTPWGYFDFNRFHCHFSPRDWQRLINNNWGFRPKRLNFKLFNIQVKEVTTNDGVTTIANNLTSTVQVFSDSDYQLPYVLGSAHEGCLPPFPADVFMVPQYGYLTLNNGSQAVGRSSFYCLEYFPSQMLRTGNNFTFSYTFEDVPFHSSYAHSQSLDRLMNPLIDQYLYYLNRTQNQSGSAQNKDLLFSRGSPAGMSVQPKNWLPGPCYRQQRVSKTKTDNNNSNFTWTGASKYNLNGRESIINPGTAMASHKDDKDKFFPMSGVMIFGKESAGASNTALDNVMITDEEEIKATNPVATERFGTVAVNLQSSSTDPATGDVHVMGALPGMVWQDRDVYLQGPIWAKIPHTDGHFHPSPLMGGFGLKNPPPQILIKNTPVPANPPAEFSATKFASFITQYSTGQVSVEIEWELQKENSKRWNPEVQYTSNYAKSANVDFTVDNNGLYTEPRPIGTRYLTRPL

SEQ ID NO: 559 - DNA, 2211 bp, Artificial Sequence
  source: /note="Description of Artificial Sequence: Synthetic polynucleotide"
atggcttccgatggttatcttccagattggctcgaggacaacctctctgagggcatccgcgagtggtgggacttgaaacctggagccccgaaacccaaagccaaccagcaaaagcaggacgacggccggggtctggtgcttcctggctacaagtacctcggacccttcaacggactcgacaagggggagcccgtcaacgcggcggatgcagcggccctcgagcacgacaaggcctacgaccagcagctcagagcgggtgacaatccgtacctgcggtataaccacgccgacgccgagtttcaggagcgtctgcaagaagatacgtcttttgggggcaacctcgggcgagcagtcttccaggccaagaagagggttctcgaaccttttggtctggttgaggaaggtgctaagacggctcctggaaagaaacgtccggtagagcagtcgccacaagagccagactcctcctcgggcattggcaagacaggccagcagcccgctaaaaagagactcaattttggtcagactggcgactcagagtcagtccccgacccacaacctctcggagaacctccagcaacccccgctgctgtgggacctactacaatggcttcaggcggtggcgcaccaatggcagacaataacgaaggcgccgacggagtgggtaatgcctcaggaaattggcattgcgattccacatggctgggcgacagagtcatcaccaccagcacccgaacatgggccttgcccacctataacaaccacctctacaagcaaatctccagtgcttcaacgggggccagcaacgacaaccactacttcggctacagcaccccctgggggtattttgatttcaacagattccactgccatttctcaccacgtgactggcagcgactcatcaacaacaattggggattccggcccaagagactcaacttcaaactcttcaacatccaagtcaaggaggtcacgacgaatgatggcgtcacaaccatcgctaataaccttaccagcacggttcaagtcttctcggactcggagtaccagcttccgtacgtcctcggctctgcgcaccagggctgcctccctccgttcccggcggacgtgttcatgattccgcagtacggctacctaacgctcaacaatggcagccaggcagtgggacggtcatccttttactgcctggaatatttcccatcgcagatgctgagaacgggcaataactttaccttcagctacaccttcgaggacgtgcctttccacagcagctacgcgcacagccagagcctggaccggctgatgaatcctctcatcgaccagtacctgtattacctgaacagaactcagaatcagtccggaagtgcccaaaacaaggacttgctgtttagccgggggtctccagctggcatgtctgttcagcccaaaaactggctacctggaccctgttaccggcagcagcgcgtttctaaaacaaaaacagacaacaacaacagcaactttacctggactggtgcttcaaaatataaccttaatgggcgtgaatctataatcaaccctggcactgctatggcctcacacaaagacgacaaagacaagttctttcccatgagcggtgtcatgatttttggaaaggagagcgccggagcttcaaacactgcattggacaatgtcatgatcacagacgaagaggaaatcaaagccactaaccccgtggccaccgaaagatttgggactgtggcagtcaatctccagagcagcagcacagaccctgcgaccggagatgtgcatgttatgggagccttacctggaatggtgtggcaagacagagacgtatacctgcagggtcccatttgggccaaaattcctcacacagatggacactttcacccgtctcctcttatgggcggctttggacttaagcacccgcctcctcagatcctcatcaaaaacacgcctgttcctgcgaatcctccggcagagttttcggctacaaagtttgcttcattcatcacccagtattctactggccaagtcagcgtggagattgaatgggagctgcagaaagaaaacagcaaacgctggaatcccgaagtgcagtatacatctaactatgcaaaatctgccaacgttgatttcactgtggacaacaatggactttatactgagcctcgtcccattggcacccgttacctcacccgtcccctgtaa

SEQ ID NO: 560 - protein, 736 aa, Artificial Sequence
  source: /note="Description of Artificial Sequence: Synthetic polypeptide"
MASDGYLPDWLEDNLSEGIREWWDLKPGAPKPKANQQKQDDGRGLVLPGYKYLGPFNGLDKGEPVNAADAAALEHDKAYDQQLRAGDNPYLRYNHADAEFQERLQEDTSFGGNLGRAVFQAKKRVLEPFGLVEEGAKTAPGKKRPVEQSPQEPDSSSGIGKTGQQPAKKRLNFGQTGDSESVPDPQPLGEPPATPAAVGPTTMASGGGAPMADNNEGADGVGNASGNWHCDSTWLGDRVITTSTRTWALPTYNNHLYKQISSASTGASNDNHYFGYSTPWGYFDFNRFHCHFSPRDWQRLINNNWGFRPKRLNFKLFNIQVKEVTTNDGVTTIANNLTSTVQVFSDSEYQLPYVLGSAHQGCLPPFPADVFMIPQYGYLTLNNGSQAVGRSSFYCLEYFPSQMLRTGNNFTFSYTFEDVPFHSSYAHSQSLDRLMNPLIDQYLYYLNRTQNQSGSAQNKDLLFSRGSPAGMSVQPKNWLPGPCYRQQRVSKTKTDNNNSNFTWTGASKYNLNGRESIINPGTAMASHKDDKDKFFPMSGVMIFGKESAGASNTALDNVMITDEEEIKATNPVATERFGTVAVNLQSSSTDPATGDVHVMGALPGMVWQDRDVYLQGPIWAKIPHTDGHFHPSPLMGGFGLKHPPPQILIKNTPVPANPPAEFSATKFASFITQYSTGQVSVEIEWELQKENSKRWNPEVQYTSNYAKSANVDFTVDNNGLYTEPRPIGTRYLTRPL

SEQ ID NO: 561 - DNA, 2211 bp, Artificial Sequence
  source: /note="Description of Artificial Sequence: Synthetic polynucleotide"
atggctgctgatggttatcttccagattggctcgaggacactctctctgaaggaataagacagtggtggaagctcaaacctggcccaccaccaccaaagcccgcagagcggcataaggacgacagcaggggtcttgtgcttcctgggtacaagtacctcggacccttcaacggactcgacaagggagagccggtcaacgaggcagacgcagcggccctcgagcacgacaaggcctacgaccagcagctcaaggccggtgacaacccctacctcaagtacaaccacgccgacgcggagttccagcagcggcttcagggcgacacatcgtttgggggcaacctcggcagagcagtcttccaggccaaaaagagggttcttgaacctcttggtctggttgagcaagcgggtgagacggctcctggaaagaagagaccgttgattgaatccccccagcagcccgactcctccacgggtatcggcaaaaaaggcaagcagccggctaaaaagagactcaattttggtcagactggcgactcagagtcagtccccgacccacaacctctcggagaacctccagcaacccccgctgctgtgggacctactacaatggcttcaggtggtggcgcaccaatggcagacaataacgaaggcgccgacggagtgggtaatgcctcaggaaattggcattgcgattccacatggctgggcgacagagtcatcaccaccagcacccgcacctgggccttgcccacctacaataaccacctctacaagcaaatctccagtgcttcaacgggggccagcaacgacaaccactacttcggctacagcaccccctgggggtattttgacttcaacagattccactgccacttttcaccacgtgactggcagcgactcatcaacaacaattggggattccggcccaagagactcaacttcaaactcttcaacatccaagtcaaggaggtcacgacgaatgatggcgtcacaaccatcgctaataaccttaccagcacggttcaagtcttctcggactcagactatcagctcccgtacgtgctcgggtcggctcacgagggctgcctcccgccgttcccagcagacgtcttcatggtgccacagtatggatacctcaccctgaacaacgggagtcaggcagtaggacgctcttcattttactgcctggagtactttccttctcagatgctgcgtaccggaaacaactttaccttcagctacacttttgaggacgttcctttccacagcagctacgctcacagccagagtctggaccgtctcatgaatcctctcatcgaccagtacctgtattacctgaacagaactcagaatcagtccggaagtgcccaaaacaaggacttgctgtttagccgggggtctccaactggcatgtctgttcagcccaaaaactggctacctggaccctgttatcggcagcagcgcgtttctaaaacaaaaacagacaacaacaacagcaactttacctggactggtgcttcaaaatataaccttaatgggcgtgaatctataatcaaccctggcactgctatggcctcacacaaagacgacaaagacaagttctttcccatgagcggtgtcatgatttttggaaaggagagcgccggagcttcaaacactgcattggacaatgtcatgatcacagacgaagaggaaatcaaagccactaaccccgtggccactgaaagatttgggactgtggcagtcaatctccagagcagcagcacagaccctgcgaccggagatgtgcatgccatgggagccttacctggaatggtgtggcaagacagagacgtatacctgcagggtcctatttgggccaaaattcctcacacggatggacactttcacccgtctcctctcatgggcggctttggactcaagaacccgcctcctcagatcctcatcaaaaacacgcctgttcctgcgaatcctccggcggagttttcagctacaaagtttgcttcattcatcacccagtattccacaggacaagtgagcgtggagattgaatgggagctgcagaaagaaaacagcaaacgctggaatcccgaagtgcagtatacatctaactatgcaaaatctgccaacgttgatttcactgtggacaacaatggactttatactgagcctcgccccattggcacccgttacctcacccgtcccctgtaa

SEQ ID NO: 562 - protein, 736 aa, Artificial Sequence
  source: /note="Description of Artificial Sequence: Synthetic polypeptide"
MAADGYLPDWLEDTLSEGIRQWWKLKPGPPPPKPAERHKDDSRGLVLPGYKYLGPFNGLDKGEPVNEADAAALEHDKAYDQQLKAGDNPYLKYNHADAEFQQRLQGDTSFGGNLGRAVFQAKKRVLEPLGLVEQAGETAPGKKRPLIESPQQPDSSTGIGKKGKQPAKKRLNFGQTGDSESVPDPQPLGEPPATPAAVGPTTMASGGGAPMADNNEGADGVGNASGNWHCDSTWLGDRVITTSTRTWALPTYNNHLYKQISSASTGASNDNHYFGYSTPWGYFDFNRFHCHFSPRDWQRLINNNWGFRPKRLNFKLFNIQVKEVTTNDGVTTIANNLTSTVQVFSDSDYQLPYVLGSAHEGCLPPFPADVFMVPQYGYLTLNNGSQAVGRSSFYCLEYFPSQMLRTGNNFTFSYTFEDVPFHSSYAHSQSLDRLMNPLIDQYLYYLNRTQNQSGSAQNKDLLFSRGSPTGMSVQPKNWLPGPCYRQQRVSKTKTDNNNSNFTWTGASKYNLNGRESIINPGTAMASHKDDKDKFFPMSGVMIFGKESAGASNTALDNVMITDEEEIKATNPVATERFGTVAVNLQSSSTDPATGDVHAMGALPGMVWQDRDVYLQGPIWAKIPHTDGHFHPSPLMGGFGLKNPPPQILIKNTPVPANPPAEFSATKFASFITQYSTGQVSVEIEWELQKENSKRWNPEVQYTSNYAKSANVDFTVDNNGLYTEPRPIGTRYLTRPL

SEQ ID NO: 563 - DNA, 2211 bp, Artificial Sequence
  source: /note="Description of Artificial Sequence: Synthetic polynucleotide"
atggctgccgatggttatcttccagattggctcgaggacaacctctctgagggcattcgcgagtggtgggcgctgaaacctggagccccgaagcccaaagccaaccagcaaaagcaggacgacggccggggtctggtgcttcctggctacaagtacctcggacccttcaacggactcgacaagggggagcccgtcaacgcggcggatgcagcggccctcgagcacgacaaggcctacgaccagcagctcaaagcgggtgacaatccgtacctgcggtataaccacgccgacgccgagtttcaggagcgtctgcaagaagatacgtcttttgggggcaacctcgggcgagcagtcttccaggccaagaagcgggttctcgaacctctcggtctggttgaggaaggcgctaagacggctcctggaaagaaacgtccggtagagcaatcgccacaagagccagactcctcctcgggcatcggcaagacaggccagcagcccgctaaaaagagactcaattttggtcagactggcgactcagagtcagtccccgacccacaacctctcggagaacctccagcaacccccgctgctgtgggacctactacaatggcttcaggcggtggcgcaccaatggcagacaataacgaaggcgccgacggagtgggtaatgcctcaggaaattggcattgcgattccacatggctgggcgacagagtcatcaccaccagcacccgaacatgggccttgcccacctataacaaccacctctacaagcaaatctccagtgcttcgacgggggccagcaacgacaaccactacttcggctacagcaccccctgggggtattttgactttaacagattccactgccacttttcaccacgtgactggcagcgactcatcaacaacaactggggattccggcccaagagactcagcttcaagctcttcaacatccaggtcaaggaggtcacgacgaatgatggcgtcacaaccatcgctaataaccttaccagcacggttcaagtcttctcggactcggagtaccagcttccgtacgtcctcggctctgcgcaccagggctgcctccctccgttcccggcggacgtgttcatgattccgcaatacggctacctgacgctcaacaatggcagccaagccgtgggacgttcatccttttactgcctggaatatttcccttctcagatgctgagaacgggcaacaactttaccttcagctacacctttgaggaagtgcctttccacagcagctacgcgcacagccagagcctggaccggctgatgaatcctctcatcgatcaatacctgtattacctgaacagaactcaaaatcagtccggaagtgcccaaaacaaggacttgctgtttagccgtgggtctccagctggcatgtctgttcagcccaaaaactggctacctggaccctgttatcggcagcagcgcgtttctaaaacaaaaacagacaacaacaacagcaattttacctggactggtgcttcaaaatataacctcaatgggcgtgaatccatcatcaaccctggcactgctatggcctcacataaagacgacgaagacaagttctttcccatgagcggtgtcatgatttttggaaaagagagcgccggagcttcaaacactgcattggacaatgtcatgattacagacgaagaggaaattaaagccactaaccctgtggccaccgaaagatttgggaccgtggcagtcaatttccagagcagcagcacagaccctgcgaccggagatgtgcatgctatgggagcattacctggcatggtgtggcaagatagagacgtgtacctgcagggtcccatttgggccaaaattcctcacacagatggacactttcacccgtctcctcttatgggcggctttggactcaagaacccgcctcctcagatcctcatcaaaaacacgcctgttcctgcgaatcctccggcggagttttcagctacaaagtttgcttcattcatcacccaatactccacaggacaagtgagcgtggagattgaatgggagctgcagaaagaaaacagcaaacgctggaatcccgaagtgcagtatacatctaactatgcaaaatctgccaacattgatttcactgtggacaacaatggactttatactgagcctcgccccattggcacccgttacctcacccgtccccagtaa

SEQ ID NO: 564 - protein, 736 aa, Artificial Sequence
  source: /note="Description of Artificial Sequence: Synthetic polypeptide"
MAADGYLPDWLEDNLSEGIREWWALKPGAPKPKANQQKQDDGRGLVLPGYKYLGPFNGLDKGEPVNAADAAALEHDKAYDQQLKAGDNPYLRYNHADAEFQERLQEDTSFGGNLGRAVFQAKKRVLEPLGLVEEGAKTAPGKKRPVEQSPQEPDSSSGIGKTGQQPAKKRLNFGQTGDSESVPDPQPLGEPPATPAAVGPTTMASGGGAPMADNNEGADGVGNASGNWHCDSTWLGDRVITTSTRTWALPTYNNHLYKQISSASTGASNDNHYFGYSTPWGYFDFNRFHCHFSPRDWQRLINNNWGFRPKRLSFKLFNIQVKEVTTNDGVTTIANNLTSTVQVFSDSEYQLPYVLGSAHQGCLPPFPADVFMIPQYGYLTLNNGSQAVGRSSFYCLEYFPSQMLRTGNNFTFSYTFEEVPFHSSYAHSQSLDRLMNPLIDQYLYYLNRTQNQSGSAQNKDLLFSRGSPAGMSVQPKNWLPGPCYRQQRVSKTKTDNNNSNFTWTGASKYNLNGRESIINPGTAMASHKDDEDKFFPMSGVMIFGKESAGASNTALDNVMITDEEEIKATNPVATERFGTVAVNFQSSSTDPATGDVHAMGALPGMVWQDRDVYLQGPIWAKIPHTDGHFHPSPLMGGFGLKNPPPQILIKNTPVPANPPAEFSATKFASFITQYSTGQVSVEIEWELQKENSKRWNPEVQYTSNYAKSANIDFTVDNNGLYTEPRPIGTRYLTRPQ

SEQ ID NO: 565 - DNA, 2211 bp, Artificial Sequence
  source: /note="Description of Artificial Sequence: Synthetic polynucleotide"
atggctgccgatggttatcttccagattggctcgaggacaacctctctgagggcattcgcgagtggtgggacttgaaacctggagccccgaaacccaaagccaaccagcaaaagcaggacgacggccggggtctggtgcttcctggctacaagtacctcggacccttcaacggactcgacaagggggagcccgtcaacgcggcggatgcagcggccctcgagcacgacaaggcctacgaccagcagctcaaagcgggtgacaatccgtaccttcggtataaccacgccgacgccgagtttcaggagcgtctgcaagaagatacgtcttttgggggcaacctcgggcgagcagtcttccaggccaaaaagagggttctcgaacctctcggtctggttgaggaagcggctaagacggctcctggaaagaaacgtccggtagagcagtcgccacaagagccagactcctcctcgggcattggcaagacaggccagcagcccgctaaaaagagactcaattttggtcagactggcgactcagagtcagtccccgacccacaacctctcggagaacctcccgcagccccctcaggtgtgggatctcttacaatggcttcaggtggtggcgcaccaatggcagacaataacgaaggcgccgacggagtgggtaatgcctcaggaaattggcattgcgattccacatggctgggcgacagagtcatcaccaccagcacccgcacctgggccttgcccacctacaataaccacctctacaagcaaatctccagtgcttcaacgggggccagcaacgacaaccactacttcggctacagcaccccctgggggtattttgacttcaacagattccactgccacttttcaccacgtgactggcaaagactcatcaacaacaattggggattccggcccaagagactcaacttcaagctcttcaacatccaagtcaaggaggtcacgacgaatgatggcgtcacgaccatcgctaataaccttaccagcacggttcaagtcttctcggactcggagtaccagttgccgtacgtcctcggctctgcgcaccagggctgcctccctccgttcccggcggacgtgttcatgattccgcagtacggctacctaacgctcaacaatggcagccaggcagtgggacggtcatccttttactgcctggaatatttcccatcgcagatgctgagaacgggcaacaactttaccttcagctacacctttgaggaagtgcctttccacagcagctacgcgcacagccagagcctggaccggctgatgaatcctctcatcgaccagtacctgtattacctgaacagaactcaaaatcagtccggaagtgcccaaaacaaggacttgctgtttagccgtgggtctccagctggcatgtctgttcagcccaaaaactggctacctggaccctgttaccggcagcagtgcgtttctaaaacaaaaacagacaacaacaacagcaactttacctggactggtgcttcaaaatataaccttaatgggcgtgaatctataatcaaccctggcactgctatggcctcacacaaagacgacaaagacaagttctttcccatgagcggtgtcatgatttttggaaaggagagcgccggagcttcaaacactgcattggacaatgtcatgatcacagacgaagaggaaatcaaagccactaaccccgtggccaccgaaagatttgggactgtggcagtcaatctccagagcagcagcacagaccctgcgaccggagatgtgcatgttatgggagccttacctggaatggtgtggcaagacagagacgtatacctgcagggtcctatttgggccaaaattcctcacacagatggacactttcacccgtctcctcttatgggcggctttggactcaagaacccgcctcctcagatcctcatcaaaaacacgcctgttcctgcgaatcctccggcggagttttcagctacaaagtttgcttcattcatcacccaatactccacaggacaagtgagcgtggagattgaatgggagctgcagaaagaaaacagcaagcgctggaatcccgaagtgcagtacacatccaattatgcaaaatctgccaacgttgatttcactgtggacaacaatggactttatactgagcctcgccccattggcacccgttacctcacccgtcccctgtaa

SEQ ID NO: 566 - protein, 736 aa, Artificial Sequence
  source: /note="Description of Artificial Sequence: Synthetic polypeptide"
MAADGYLPDWLEDNLSEGIREWWDLKPGAPKPKANQQKQDDGRGLVLPGYKYLGPFNGLDKGEPVNAADAAALEHDKAYDQQLKAGDNPYLRYNHADAEFQERLQEDTSFGGNLGRAVFQAKKRVLEPLGLVEEAAKTAPGKKRPVEQSPQEPDSSSGIGKTGQQPAKKRLNFGQTGDSESVPDPQPLGEPPAAPSGVGSLTMASGGGAPMADNNEGADGVGNASGNWHCDSTWLGDRVITTSTRTWALPTYNNHLYKQISSASTGASNDNHYFGYSTPWGYFDFNRFHCHFSPRDWQRLINNNWGFRPKRLNFKLFNIQVKEVTTNDGVTTIANNLTSTVQVFSDSEYQLPYVLGSAHQGCLPPFPADVFMIPQYGYLTLNNGSQAVGRSSFYCLEYFPSQMLRTGNNFTFSYTFEEVPFHSSYAHSQSLDRLMNPLIDQYLYYLNRTQNQSGSAQNKDLLFSRGSPAGMSVQPKNWLPGPCYRQQCVSKTKTDNNNSNFTWTGASKYNLNGRESIINPGTAMASHKDDKDKFFPMSGVMIFGKESAGASNTALDNVMITDEEEIKATNPVATERFGTVAVNLQSSSTDPATGDVHVMGALPGMVWQDRDVYLQGPIWAKIPHTDGHFHPSPLMGGFGLKNPPPQILIKNTPVPANPPAEFSATKFASFITQYSTGQVSVEIEWELQKENSKRWNPEVQYTSNYAKSANVDFTVDNNGLYTEPRPIGTRYLTRPL

SEQ ID NO: 567 - DNA, 2211 bp, Artificial Sequence
  source: /note="Description of Artificial Sequence: Synthetic polynucleotide"
atggctgccgatggttatcttccagattggctcgaggacaacctctctgagggcattcgcgaatggtgggacttgaaacctggagccccgaaacccaaagtcaaccagcaaaagcaggacaacgctcggggtcttgtgcttccgggttacaaatacctcggacccttcaacggactcgacaagggggagcccgtcaacgcggcggacgcagcggccctcgagcacgacaaggcctacgaccagcagctcaaagcgggtgacaatccgtaccttcggtataaccacgccgacgccgagtttcaggagcgtctgcaagaagatacgtcttttgggggcaaccttggacgagcagtcttccaggccaagaagagggttctcgaaccttttggtctggttgaggaaggtgctaagacggctcctggaaagaaacgtccggtagagcagtcgccacaagagccagactcctcctcgggcattggcaagacaggccagcagcccgctaaaaagagactcaattttggtcagactggcgactcagagtcagtccccgacccacaacctctcggagaacctccagcaacccccgctgctgtgggacctactacaatggcttcaggcggtggcgcaccaatggcagacaataacgaaggcgccgacggagtgggtaatgcctcaggaaattggcattgcgattccacatggctgggcgacagagtcatcaccaccagcacccgcacctgggccttgcccacctacaataaccacctctacaagcaaatctccagtgcttcaacgggggccagcaacgacaaccactacttcggctacagcaccccctgggggtattttgacttcaacagattccactgccacttttcaccacgtgactggcaaagactcatcaacaacaattggggattccggcccaagagactcaacttcaagctcttcaacatccaagtcaaggaggtcacgacgaatgatggcgtcacgaccatcgctaataaccttaccagcacggttcaagtcttctcggactcggagtaccagttgccgtacgtcctcggctctgcgcaccagggctgcctccctccgttcccggcggacgtgttcatgattccgcaatacggctacctgacgctcaacaatggcagccaggcagtgggacggtcatccttttactgcctggaatatttcccatcgcagatgctgagaacgggcaataactttaccttcagctacacttttgaggacgttcctttccacagcagctacgctcacagccagagcctggaccggctgatgaatcctctcatcgaccagtacctgtattacctgaacagaactcagaatcagtccggaagtgcccaaaacaaggacttgctgtttagccgtgggtctccaactggcatgtctgttcagcccaaaaactggctacctggaccctgttatcggcagcagcgcgtttctaaaacaaaaacagacaacaacaacagcaactttacctggactggtgcttcaaaatataaccttaatgggcgtgaatctataatcaaccctggcactgctatggcctcacacaaagacgacgaagacaagttctttcccatgagcggtgtcatgatttttggaaaggagagcgccggagcttcaaacactgcattggacaatgtcatgatcacagacgaagaggaaatcaaagccactaaccccgtggccactgaaagatttgggactgtggcagtcaatctccagagcagcagcacagaccctgcgaccggagatgtgcatgccatgggagccttacctggaatggtgtggcaagacagagacgtatacctgcagggtcctatttgggccaaaattcctcacacggatggacactttcacccgtctcctctcatgggcggctttggacttaagcacccgcctcctcagatcctcatcaaaaacacgcctgttcctgcgaatcctccggcagagttttcggctacaaagtttgcttcattcatcacccagtattccacaggacaagtgagcgtggagattgaatgggagctgcagaaagaaaacagcaaacgctggaatcccgaagtgcagtatacatctaactatgcaaaatctgccaacgttgatttcactgtggacaacaatggactttatactgagcctcgccccattggcacccgttacctcacccgtcccctgtaa

SEQ ID NO: 568 - protein, 736 aa, Artificial Sequence
  source: /note="Description of Artificial Sequence: Synthetic polypeptide"
MAADGYLPDWLEDNLSEGIREWWDLKPGAPKPKVNQQKQDNARGLVLPGYKYLGPFNGLDKGEPVNAADAAALEHDKAYDQQLKAGDNPYLRYNHADAEFQERLQEDTSFGGNLGRAVFQAKKRVLEPFGLVEEGAKTAPGKKRPVEQSPQEPDSSSGIGKTGQQPAKKRLNFGQTGDSESVPDPQPLGEPPATPAAVGPTTMASGGGAPMADNNEGADGVGNASGNWHCDSTWLGDRVITTSTRTWALPTYNNHLYKQISSASTGASNDNHYFGYSTPWGYFDFNRFHCHFSPRDWQRLINNNWGFRPKRLNFKLFNIQVKEVTTNDGVTTIANNLTSTVQVFSDSEYQLPYVLGSAHQGCLPPFPADVFMIPQYGYLTLNNGSQAVGRSSFYCLEYFPSQMLRTGNNFTFSYTFEDVPFHSSYAHSQSLDRLMNPLIDQYLYYLNRTQNQSGSAQNKDLLFSRGSPTGMSVQPKNWLPGPCYRQQRVSKTKTDNNNSNFTWTGASKYNLNGRESIINPGTAMASHKDDEDKFFPMSGVMIFGKESAGASNTALDNVMITDEEEIKATNPVATERFGTVAVNLQSSSTDPATGDVHAMGALPGMVWQDRDVYLQGPIWAKIPHTDGHFHPSPLMGGFGLKHPPPQILIKNTPVPANPPAEFSATKFASFITQYSTGQVSVEIEWELQKENSKRWNPEVQYTSNYAKSANVDFTVDNNGLYTEPRPIGTRYLTRPL

SEQ ID NO: 569 - DNA, 2208 bp, Artificial Sequence
  source: /note="Description of Artificial Sequence: Synthetic polynucleotide"
  modified_base (955)..(955): a, c, t, or g
  modified_base (971)..(972): a, c, t, or g
  modified_base (981)..(981): a, c, t, or g
  modified_base (986)..(986): a, c, t, or g
  modified_base (1235)..(1235): a, c, t, or g
  modified_base (1694)..(1696): a, c, t, or g
  modified_base (1698)..(1698): a, c, t, or g
  modified_base (1763)..(1765): a, c, t, or g
  modified_base (1778)..(1778): a, c, t, or g
  modified_base (2204)..(2204): a, c, t, or g
atggctgccgatggttatcttccagattggctcgaggacaacctctctgagggcattcgcgaatggtgggacttgaaacctggagccccgaaacccaaagtcaaccagcaaaagcaggacaacgctcggggtcttgtgcttccgggttacaaatacctcggacccttcaacggactcgacaagggggagcccgtcaacgcggcggacgcagcggccctcgagcacgacaaggcctacgaccagcagctcaaagcgggtgacaatccgtaccttcggtataaccacgccgacgccgagtttcaggagcgtctgcaagaagatacgtcttttgggggcaaccttggacgagcagtcttccaggccaagaagagggttctcgaaccttttggtctggttgaggaaggtgctaagacggctcctggaaagaaacgtccggtagagcagtcgccacaagagccagactcctcctcgggcattggcaagacaggccagcagcccgctaaaaagagactcaattttggtcagactggcgactcagagtcagtccccgacccacaacctctcggagaacctccagcaacccccgctgctgtgggacctactacaatggcttcaggcggtggcgcaccaatggcagacaataacgaaggcgccgacggagtgggtaatgcctcaggaaattggcattgcgattccacatggctgggcgacagagtcatcaccaccagcacccgaacatgggccttgcccacctataacaaccacctctacaagcaaatctccagtgcttcaacgggggccagcaacgacaaccactacttcggctacagcaccccctgggggtattttgatttcaacagattccactgccacttttcaccacgtgactggcagcgactcatcaataacaattggggattccggcccaagagactcaacttcaaactcttcaacntccaagtcaaggaggnnacgacgaangatgncgtcacaaccatcgctaataaccttaccagcacggttcaagtcttctcggactcggagtaccagcttccgtacgtcctcggctctgcgcaccagggctgcctccctccgttcccggcggacgtgttcatgattccgcaatacggctacctgacgctcaacaatggcagccaggcagtgggacggtcatccttttactgcctggaatatttcccatcgcagatgctgagaacgggcaataactttacctncagctacacttttgaggacgttcctttccacagcagctacgctcacagccagagcctggaccggctgatgaatcctctcatcgaccagtacctgtattacctgaacagaactcagaatcagtccggaagtgcccaaaacaaggacttgctgtttagccgtgggtctccaactggcatgtctgttcagcccaaaaactggctacctggaccctgttatcggcagcagcgcgtttctaaaacaaaaacagacaacaacaacagcaactttacctggactggtgcttcaaaatataaccttaatgggcgtgaatctataatcaaccctggcactgctatggcctcacacaaagacgacgaagacaagttctttcccatgagcggtgtcatgatttttggaaaggagagcgccggagcttcaaacactgcattggacaatgtcatgatcacagacgaagagannncnaagccactaaccccgtggccactgaaagatttgggactgtggcagtcaatctccaagcagcacannnaccctgcgaccgnagatgtgcatgccatgggagccttacctggaatggtgtggcaagacagagacgtatacctgcagggtcctatttgggccaaaattcctcacacggatggacactttcacccgtctcctctcatgggcggctttggacttaagcacccgcctcctcagatcctcatcaaaaacacgcctgttcctgcgaatcctccggcagagttttcggctacaaagtttgcttcattcatcacccagtattccacaggacaagtgagcgtggagattgaatgggagctgcagaaagaaaacagcaaacgctggaatcccgaagtgcagtatacatctaactatgcaaaatctgccaacgttgatttcactgtggacaacaatggactttatactgagcctcgccccattggcacccgttacctcacccgtccccngtaa

SEQ ID NO: 570 - protein, 723 aa, Artificial Sequence
  source: /note="Description of Artificial Sequence: Synthetic polypeptide"
MAADGYLPDWLEDNLSEGIREWWDLKPGAPKPKVNQQKQDNARGLVLPGYKYLGPFNGLDKGEPVNAADAAALEHDKAYDQQLKAGDNPYLRYNHADAEFQERLQEDTSFGGNLGRAVFQAKKRVLEPFGLVEEGAKTAPGKKRPVEQSPQEPDSSSGIGKTGQQPAKKRLNFGQTGDSESVPDPQPLGEPPATPAAVGPTTMASGGGAPMADNNEGADGVGNASGNWHCDSTWLGDRVITTSTRTWALPTYNNHLYKQISSASTGASNDNHYFGYSTPWGYFDFNRFHCHFSPRDWQRLINNNWGFRPKRLNFKLFNQVKETTDVTTIANNLTSTVQVFSDSEYQLPYVLGSAHQGCLPPFPADVFMIPQYGYLTLNNGSQAVGRSSFYCLEYFPSQMLRTGNNFTSYTFEDVPFHSSYAHSQSLDRLMNPLIDQYLYYLNRTQNQSGSAQNKDLLFSRGSPTGMSVQPKNWLPGPCYRQQRVSKTKTDNNNSNFTWTGASKYNLNGRESIINPGTAMASHKDDEDKFFPMSGVMIFGKESAGASNTALDNVMITDEEATNPVATERFGTVAVNLQSSPATDVHAMGALPGMVWQDRDVYLQGPIWAKIPHTDGHFHPSPLMGGFGLKHPPPQILIKNTPVPANPPAEFSATKFASFITQYSTGQVSVEIEWELQKENSKRWNPEVQYTSNYAKSANVDFTVDNNGLYTEPRPIGTRYLTRP

SEQ ID NO: 571 - DNA, 2208 bp, Artificial Sequence
  source: /note="Description of Artificial Sequence: Synthetic polynucleotide"
atggctgccgatggttatcttccagattggctcgaggacactctctctgaaggaataagacagtggtggaagctcaaacctggcccaccaccaccaaagcccgcagagcggcataaggacgacagcaggggtcttgtgcttcctgggtacaagtacctcggacccttcaacggactcgacaagggagagccggtcaacgaggcagacgccgcggccctcgagcacgacaaagcctatgaccggcagctcgacagcggagacaacccgtacctcaagtacaaccacgccgacgcggagtttcaggagcgccttaaagaagatacgtcttttgggggcaacctcggacgagcagtcttccaggcgaaaaagagggttcttgaacctctgggcctggttgaggaacctgttaagacggctccgggaaaaaagaggccggtagagcactctcctgtggagccagactcctcctcgggaaccggaaaggcgggtcagcagcctgcaagaaaaagattgaattttggtcagactggagacgcagactcagtacctgacccccagcctctcggacagccaccagcagccccctctggtctgggaactaatacgatggctacaggcagtggcgcaccaatggcagacaataacgagggcgccgacggagtgggtaattcctcgggaaattggcattgcgattccacatggatgggcgacagagtcatcaccaccagcacccgaacctgggccctgcccacctacaacaaccacctctacaaacaaatttccagccaatcaggagcctcgaacgacaatcactactttggctacagcaccccttgggggtattttgacttcaacagattccactgccacttttcaccacgtgactggcaaagactcatcaacaacaactggggattccgacccaagagactcaagttcaagctctttaacattcaagtcaaagaggtcacgcagaatgacggtacgacgacgattgccaataaccttaccagcacggttcaggtgtttactgactcggagtaccagctcccgtacgtcctcggctcggcgcatcaaggatgcctcccgccgttcccagcagacgtcttcatggtgccacagtatggatacctcaccctgaacaacgggagtcaggcagtaggacgctcttcattttactgcctggagtactttccttctcagatgctgcgtaccggtaacaactttaccttcagctacacttttgaggacgttcctttccacagcagctacgctcacagccagagtctggaccgtctcatgaatcctctcatcgaccagtacctgtattacttgagcagaacagacgctccaagtggaaccaccacgcagtcaaggcttcagttttctcaggccggagcgagtgacattcgggaccagtctaggaactggcttcctggaccctgttaccgccagcagcgagtatcaaagacatctgcggataacaacaacagtgaatactcgtggactggagctaccaagtaccacctcaatggcagagactctctggtgaatccgggcccggccatggcaagccacaaggacgatgaagaaaagttttttcctcagagcggggttctcatctttgggaagcaaggctcagagaaaacaagtgtggacattgaaaaggtcatgattacagacgaagaggaaatcaggacaaccaatcccgtggctacggagcagtatggttctgtatctaccaacctccagagaggcaacagacaagcagctaccgcagatgtcaacacacaaggcgttcttccaggcatggtctggcaggacagagatgtgtaccttcaggggcccatctgggcaaagattccacacacggacggacattttcacccctctcccctcatgggtggattcggacttaaacaccctcctccacagattctcatcaagaacaccccggtacctgcgaatccttcgaccaccttcagtgcggcaaagtttgcttccttcatcacacagtactccacgggacaggtcagcgtggagatcgagtgggagctgcagaaggaaaacagcaaacgctggaatcccgaagttcagtacacttccaactacaacaagtctgttaatgtggactttactgtggacactaatggcgtgtattcagagcctcgccccattggcaccagatacctgactcgtaatctgtaa

SEQ ID NO: 572 - protein, 735 aa, Artificial Sequence
  source: /note="Description of Artificial Sequence: Synthetic polypeptide"
MAADGYLPDWLEDTLSEGIRQWWKLKPGPPPPKPAERHKDDSRGLVLPGYKYLGPFNGLDKGEPVNEADAAALEHDKAYDRQLDSGDNPYLKYNHADAEFQERLKEDTSFGGNLGRAVFQAKKRVLEPLGLVEEPVKTAPGKKRPVEHSPVEPDSSSGTGKAGQQPARKRLNFGQTGDADSVPDPQPLGQPPAAPSGLGTNTMATGSGAPMADNNEGADGVGNSSGNWHCDSTWMGDRVITTSTRTWALPTYNNHLYKQISSQSGASNDNHYFGYSTPWGYFDFNRFHCHFSPRDWQRLINNNWGFRPKRLKFKLFNIQVKEVTQNDGTTTIANNLTSTVQVFTDSEYQLPYVLGSAHQGCLPPFPADVFMVPQYGYLTLNNGSQAVGRSSFYCLEYFPSQMLRTGNNFTFSYTFEDVPFHSSYAHSQSLDRLMNPLIDQYLYYLSRTDAPSGTTTQSRLQFSQAGASDIRDQSRNWLPGPCYRQQRVSKTSADNNNSEYSWTGATKYHLNGRDSLVNPGPAMASHKDDEEKFFPQSGVLIFGKQGSEKTSVDIEKVMITDEEEIRTTNPVATEQYGSVSTNLQRGNRQAATADVNTQGVLPGMVWQDRDVYLQGPIWAKIPHTDGHFHPSPLMGGFGLKHPPPQILIKNTPVPANPSTTFSAAKFASFITQYSTGQVSVEIEWELQKENSKRWNPEVQYTSNYNKSVNVDFTVDTNGVYSEPRPIGTRYLTRNL

SEQ ID NO: 573 - DNA, 2208 bp, Artificial Sequence
  source: /note="Description of Artificial Sequence: Synthetic polynucleotide"
atggctgccgatggttatcttccagattggctcgaggacactctctctgaaggaataagacagtggtggaagctcaaacctggcccaccaccaccaaagcccgcagagcggcataaggacgacagcaggggtcttgtgcttcctgggtacaagtacctcggacccttcaacggactcgacaagggagagccggtcaacgaggcagacgccgcggccctcgagcacgacaaagcctatgaccggcagctcgacagcggagacaacccgtacctcaagtacaaccacgccgacgcggagtttcaggagcgccttaaagaagatacgtcttttgggggcaacctcggacgagcagtcttccaggcgaaaaagagggttcttgaacctctgggcctggttgaggaacctgttaagacggctccgggaaaaaagaggccggtagagcactctcctgtggagccagactcctcctcgggaaccggaaaggcgggccagcagcctgcaagaaaaagattgaattttggtcagactggagacgcaaactcagtacctgacccccagcctctcggacagccaccagcagccccctctggtctgggaactaatacgatggctacaggcagtggcgcaccaatggcagacaataacgagggcgccgacggagtgggtaattcctcgggaaattggcattgcgattccacatggatgggcgacagagtcatcaccaccagcacccgaacctgggccctgcccacctacaacaaccacctctacaaacaaatttccagccaatcaggagcctcgaacgacaatcactactttggctacagcaccccttgggggtattttgacttcaacagattccactgccacttttcaccacgtgactggcaaagactcatcaacaacaactggggattccgacccaagagactcaagttcaagctctttaacattcaagtcaaagaggtcacgcagaatgacggtacgacgacgattgccaataaccttaccagcacggttcaggtgtttactgactcggagtaccagctcccgtacgtcctcggctcggcgcatcaaggatgcctcccgccgttcccagcagacgtcttcatggtgccacagtatggatacctcaccctgaacaacgggagtcgggcagtaggacgctcttcattttactgcctggagtactttccttctcagatgctgcgtaccggtaacaactttaccttcagctacacttttgaggacgttcctttccacagcagctacgctcacagccagagtctggaccgtctcatgaatcctctcatcgaccagtacctgtattacttgagcagaacagacactccaagtggaaccaccacgcagtcaaggcttcagttttctcaggccggagcgagtgacattcgggaccagtctaggaactggcttcctggaccctgttaccgccagcagcgagtatcaaagacatctgcggataacaacaacagtgaatactcgtggactggagctaccaagtaccacctcaatggcagagactctctggtgaatccgggcccggccatggcaagccacaaggacgatgaagaaaagttttttcctcagagcggggttctcatctttgggaagcaaggctcagagaaaacaagtgtggacattgaaaaggtcatgattacagacgaagaggaaatcaggacgaccaatcccgtggctacggagcagtatggttctgtatctaccaacctccagagaggcaacagacaagcagctaccgcagatgtcaacacacaaggcgttcttccaggcatggtctggcaggacagagatgtgtaccttcaggggcccatctgggcaaagattccacacacggacggacattttcacccctctcccctcatgggtggattcggacttaaacaccctcctccacagattctcatcaagaacaccccggtacctgcgaatccttcgaccaccttcagtgcggcaaagtttgcttccttcatcacacagtactccacgggacaggtcagcgtggagatcgagtgggagctgcagaaggaaaacagcaaacgctggaatcccgaagttcagtacacttccaactacaacaagtctgttaatgtggactttactgtggacactaatggcgtgtatacagagcctcgccccattggcaccagatacctgactcgtaatctgtaa

SEQ ID NO: 574 - protein, 735 aa, Artificial Sequence
  source: /note="Description of Artificial Sequence: Synthetic polypeptide"
MAADGYLPDWLEDTLSEGIRQWWKLKPGPPPPKPAERHKDDSRGLVLPGYKYLGPFNGLDKGEPVNEADAAALEHDKAYDRQLDSGDNPYLKYNHADAEFQERLKEDTSFGGNLGRAVFQAKKRVLEPLGLVEEPVKTAPGKKRPVEHSPVEPDSSSGTGKAGQQPARKRLNFGQTGDANSVPDPQPLGQPPAAPSGLGTNTMATGSGAPMADNNEGADGVGNSSGNWHCDSTWMGDRVITTSTRTWALPTYNNHLYKQISSQSGASNDNHYFGYSTPWGYFDFNRFHCHFSPRDWQRLINNNWGFRPKRLKFKLFNIQVKEVTQNDGTTTIANNLTSTVQVFTDSEYQLPYVLGSAHQGCLPPFPADVFMVPQYGYLTLNNGSRAVGRSSFYCLEYFPSQMLRTGNNFTFSYTFEDVPFHSSYAHSQSLDRLMNPLIDQYLYYLSRTDTPSGTTTQSRLQFSQAGASDIRDQSRNWLPGPCYRQQRVSKTSADNNNSEYSWTGATKYHLNGRDSLVNPGPAMASHKDDEEKFFPQSGVLIFGKQGSEKTSVDIEKVMITDEEEIRTTNPVATEQYGSVSTNLQRGNRQAATADVNTQGVLPGMVWQDRDVYLQGPIWAKIPHTDGHFHPSPLMGGFGLKHPPPQILIKNTPVPANPSTTFSAAKFASFITQYSTGQVSVEIEWELQKENSKRWNPEVQYTSNYNKSVNVDFTVDTNGVYTEPRPIGTRYLTRNL

SEQ ID NO: 575 - DNA, 2211 bp, Artificial Sequence
  source: /note="Description of Artificial Sequence: Synthetic polynucleotide"
atggctgccgatggttatcttccagattggctcgaggacactctctctgaaggaataagacagtggtggaagctcaaacctggcccaccaccaccaaagcccgcagagcggcataaggacgacagcaggggtcttgtgcttcctgggtacaagtacctcggacccttcaacggactcgacaagggagagccggtcaacgaggcagacgccgcggccctcgagcacgacaaggcctacgaccagcagctcaaagcgggtgacaatccgtacctgcggtataaccacgccgacgccgagtttcaggagcgtctgcaagaagatacgtcttttgggggcaacctcgggcgagcagtcttccaggccaagaagcgggttctcgaacctctcggtctggttgaggaaggcgctaagacggctcctggaaagaaacgtccggtagagcagtcgccacaagagccagactcctcctcgggcatcggcaagacaggccagcagcccgctaaaaagagactcaattttggtcagactggcgactcagagtcagtccccgacccacaacctctcggagaacctccagcaacccccgctgctgtgggacctactacaatggcttcaggcggtggcgcaccaatggcagacaataacgaaggcgccgacggagtgggtaatgcctcaggaaattggcattgcgattccacatggctgggcgacagagtcatcaccaccagcacccgaacatgggccttgcccacctataacaaccacctctacaagcaaatctccagtgcttcgacgggggccagcaacgacaaccactacttcggctacagcaccccctgggggtattttgactttaacagattccactgccacttttcaccacgtgactggcagcgactcatcaacaataactggggattccggcccaagagactcagcttcaagctcttcaacatccaggtcaaggaggtcacgacgaatgatggcgtcacaaccatcgctaataaccttaccagcacggttcaagtcttctcggactcggagtaccagcttccgtacgtcctcggctctgcgcaccagggctgcctccctccgttcccggcggacgtgttcatgattccgcaatacggctacctgacgctcaacaatggcagccaagccgtgggacgttcatccttttactgcctggaatatttcccttctcagatgctgagaacgggcaacaactttaccttcagctacacctttgaggaagtgcctttccacagcagctacgcgcacagccagagcctggaccggctgatgaatcctctcatcgatcaatacctgtattacctgaacagaactcaaaatcagtccggaagtgcccaaaacaaggacttgctgtttagccgtgggtctccagctggcatgtctgttcagcccaaaaactggctacctggaccctgttatcggcagcagcgcgtttctaaaacaaaaacagacaacaacaacagcaattttacctggactggtgcttcaaaatataacctcaatgggcgtgaatccatcatcaaccctggcactgctatggcctcacacaaagacgacgaagacaagttctttcccatgagcggtgtcatgatttttggaaaagagagcgccggagcttcaaacactgcattggacaatgtcatgattacggacgaagaggaaattaaagccactaaccctgtggccaccgaaagatttgggaccgtggcagtcaatttccagagcagcagcacagaccctgcgaccggagatgtgcatgctatgggagcattacctggcatggtgtggcaagatagagacgtgtacctgcagggtcccatttgggccaaaattcctcacacagatggacactttcacccgtctcctcttatgggcggctttggactcaagaacccgcctcctcagatcctcatcaaaaacacgcctgttcctgcgaatcctccggcggagttttcagctacaaagtttgcttcattcatcactcaatactccacaggacaagtgagcgtggaaattgaatgggagctgcagaaagaaaacagcaaacgctggaatcccgaagtgcagtatacatctaactatgcaaaatctgccaacgttgatttcactgtggacaacaatggactttatactgagcctcgccccattggcacccgttacctcacccgtcccctgtaa

SEQ ID NO: 576 - protein, 736 aa, Artificial Sequence
  source: /note="Description of Artificial Sequence: Synthetic polypeptide"
MAADGYLPDWLEDTLSEGIRQWWKLKPGPPPPKPAERHKDDSRGLVLPGYKYLGPFNGLDKGEPVNEADAAALEHDKAYDQQLKAGDNPYLRYNHADAEFQERLQEDTSFGGNLGRAVFQAKKRVLEPLGLVEEGAKTAPGKKRPVEQSPQEPDSSSGIGKTGQQPAKKRLNFGQTGDSESVPDPQPLGEPPATPAAVGPTTMASGGGAPMADNNEGADGVGNASGNWHCDSTWLGDRVITTSTRTWALPTYNNHLYKQISSASTGASNDNHYFGYSTPWGYFDFNRFHCHFSPRDWQRLINNNWGFRPKRLSFKLFNIQVKEVTTNDGVTTIANNLTSTVQVFSDSEYQLPYVLGSAHQGCLPPFPADVFMIPQYGYLTLNNGSQAVGRSSFYCLEYFPSQMLRTGNNFTFSYTFEEVPFHSSYAHSQSLDRLMNPLIDQYLYYLNRTQNQSGSAQNKDLLFSRGSPAGMSVQPKNWLPGPCYRQQRVSKTKTDNNNSNFTWTGASKYNLNGRESIINPGTAMASHKDDEDKFFPMSGVMIFGKESAGASNTALDNVMITDEEEIKATNPVATERFGTVAVNFQSSSTDPATGDVHAMGALPGMVWQDRDVYLQGPIWAKIPHTDGHFHPSPLMGGFGLKNPPPQILIKNTPVPANPPAEFSATKFASFITQYSTGQVSVEIEWELQKENSKRWNPEVQYTSNYAKSANVDFTVDNNGLYTEPRPIGTRYLTRPL

SEQ ID NO: 577 - protein, 735 aa, Artificial Sequence
  source: /note="Description of Artificial Sequence: Synthetic polypeptide"
MAADGYLPDWLEDTLSEGIRQWWKLKPGPPPPKPAERHKDDSRGLVLPGYKYLGPFNGLDKGEPVNEADAAALEHDKAYDRQLDSGDNPYLKYNHADAEFQERLKEDTSFGGNLGRAVFQAKKRVLEPLGLVEEPVKTAPGKKRPVEHSPVEPDSSSGTGKAGQQPARKRLNFGQTGDADSVPDPQPLGQPPAAPSGLGTNTMATGSGAPMADNNEGADGVGNSSGNWHCDSTWMGDRVITTSTRTWALPTYNNHLYKQISSQSGASNDNHYFGYSTPWGYFDFNRFHCHFSPRDWQRLINNNWGFRPKRLKFKLFNIQVKEVTQNDGTTTIANNLTSTVQVFTDSEYQLPYVLGSAHQGCLPPFPADVFMVPQYGYLTLNNGSQAVGRSSFYCLEYFPSQMLRTGNNFTFSYTFEDVPFHSSYAHSQSLDRLMNPLIDQYLYYLSRTDTPSGTTTQSRLQFSQAGASDIRNQSRNWLPGPCYRQQRVSKTSADNNNSEYSWTGATKYHLNGRDSLVNPGPAMASHKDDEEKFFPQSGVLIFGKQGSEKTSVDIEKVMITDEEEIRTTNPVATEQYGSVSTNLQRGNRQAATADVNTQGVLPGMVWQDRDVYLQGPIWAKIPHTDGHFHPSPLMGGFGLKHPPPQILIKNTPVPANPSTTFSAAKFASFITQYSTGQVSVEIEWELQKENSKRWNPEVQYTSNYNKSVNVDFTVDTNGVYSEPRPIGTRYLTRNQ

SEQ ID NO: 578 - DNA, 2208 bp, Artificial Sequence
  source: /note="Description of Artificial Sequence: Synthetic polynucleotide"
atggctgccgatggttatcttccagattggctcgaggacactctctctgaaggaataagacagtggtggaagctcaaacctggcccaccaccaccaaagcccgcagagcggcataaggacgacagcaggggtcttgtgcttcctgggtacaagtacctcggacccttcaacggactcgacaagggagagccggtcaacgaggcagacgccgcggccctcgagcacgacaaagcctatgaccggcagctcgacagcggagacaacccgtacctcaagtacaaccacgccgacgcggagtttcaggaacgccttaaagaagatacgtcttttgggggcaacctcggacgagcagtcttccaggcgaaaaagagggttcttgaacctctgggcctggttgaggaacctgttaagacggctccgggaaaaaagaggccggtagagcactctcctgtggagccagactcctcctcgggaaccggaaaggcgggccagcagcctgcaagaaaaagattgaattttggtcagactggagacgcagactcagtacctgacccccagcctctcggacagccaccagcagccccctctggtctgggaactaatacgatggctacaggcagtggcgcaccaatggcagacaataacgagggcgccgacggagtgggtaattcctcgggaaattggcattgcgattccacatggatgggcgacagagtcatcaccaccagcacccgaacctgggccctgcccacctacaacaaccacctctacaaacaaatttccagccaatcaggagcctcgaacgacaatcactactttggctacagcaccccttgggggtattttgacttcaacagattccactgccacttttcaccacgtgactggcaaagactcatcaacaacaactggggattccgacccaagagactcaagttcaagctctttaacattcaagtcaaagaggtcacgcagaatgacggtacgacgacgattgccaataaccttaccagcacggttcaggtgtttactgactcggagtaccagctcccgtacgtcctcggctcggcgcatcaaggatgcctcccgccgttcccagcagacgtcttcatggtgccacagtatggatacctcaccctgaacaacgggagtcaggcagtaggacgctcttcattttactgcctggagtactttccttctcagatgctgcgtaccggtaacaactttaccttcagctacacttttgaggacgttcctttccacagcagctacgctcacagccagagtctggaccgtctcatgaatcctctcatcgaccagtacctgtattacttgagcagaacagacactccaagtggaaccaccacgcagtcaaggcttcagttttctcaggccggagcgagtgacattcggaaccagtctaggaactggcttcctggaccctgttaccgccagcagcgagtatcaaagacatctgcggataacaacaacagtgaatactcgtggactggagctaccaagtaccacctcaatggcagagactctctggtgaatccgggcccggccatggcaagccacaaggacgatgaagaaaagttttttcctcagagcggggttctcatctttgggaagcaaggctcagagaaaacaagtgtggacattgaaaaggtcatgattacagacgaagaggaaatcaggacaaccaatcccgtggctacggagcagtatggttctgtatctaccaacctccagagaggcaacagacaagcagctaccgcagatgtcaacacacaaggcgttcttccaggcatggtctggcaggacagagatgtgtaccttcaggggcccatctgggcaaagattccacacacggacggacattttcacccctctcccctcatgggtggattcggacttaaacaccctcctccacagattctcatcaagaacaccccggtacctgcgaatccttcgaccaccttcagtgcggcaaagtttgcttccttcatcacacagtactccacgggacaggtcagcgtggagatcgagtgggagctgcagaaggaaaacagcaaacgctggaatcccgaagttcagtacacttccaactacaacaagtctgttaatgtggactttactgtggacactaatggcgtgtattcagagcctcgccccattggcaccagatacctgactcgtaatcagtaa

SEQ ID NO: 579 - DNA, 2208 bp, Artificial Sequence
  source: /note="Description of Artificial Sequence: Synthetic polynucleotide"
atggctgccgatggttatcttccagattggctcgaggacactctctctgaaggaataagacagtggtggaagctcaaacctggcccaccaccaccaaagcccgcagagcggcataaggacgacagcaggggtcttgtgcttcctgggtacaagtacctcggacccttcaacggactcgacaagggagagccggtcaacgaggcagacgccgcggccctcgagcacgacaaagcctatgaccggcagctcgacagcggagacaacccgtacctcaagtacaaccacgccgacgcggagtttcaggagcgccttaaagaagatacgtcttttgggggcaacctcggacgagcagtcttccaggcgaaaaagagggttcttgaacctctgggcctggttgaggaacctgttaagacggctccgggaaaaaagaggccggtagagcactctcctgtggagccagactcctcctcgggaaccggaaaggcgggccagcagcctgcaagaaaaagattgaattttggtcagactggagacgcagactcagtacctgatccccagcctctcggacagccaccagcagccccctctggtctgggaactaatacgatggctacaggcagtggcgcaccaatggcagacaataacgagggcgccgacggagtgggtaattcctcgggaaattggcattgcgattccacatggatgggcgacagagtcatcaccaccagcacccgaacctgggccctgcccacctacaacaaccacctctacaaacaaatttccagccaatcaggagcctcgaacgacaatcactactttggctacagcaccccttgggggtattttgacttcaacagattccactgccacttttcaccacgtgactggcaaagactcatcaacaacaactggggattccgacccaagagactcaagttcaagctctttaacattcaagtcaaagaggtcacgcagaatgacggtacgacgacgattgccaataaccttaccagcacggttcaggtgtttactgactcggagtaccagctcccgtatgtcctcggctcggcgcatcaaggatgcctcccgccgttcccagcagacgtcttcatggtgccacagtatggatacctcaccctgaacaacgggagtcaggcagtaggacgctcttcattttactgcctggagtactttccttctcagatgctgcgtaccggtaacaactttaccttcagctacacttttgaggacgttcctttccacagcagctacgctcacagccagagtctggaccgtctcatgaatcctctcatcgaccagtacctgtattacttgagcagaacagacactccaagtggaaccaccacgcagtcaaggcttcagttttctcaggccggagcgagtgacattcgggaccagtctaggaactggcttcctggaccctgttaccgccagcagcgagtatcaaagacatctgcggataacaacaacagtgaatactcgtggactggagctaccaagtaccacctcaatggcagagactctctggtgaatccgggcccggccatggcaagccacaaggacgatgaagaaaagttttttcctcagagcggggttctcatctttgggaagcaaggctcagagaaaacaagtgtggacattgaaaaggtcatgattacagacgaagaggaaatcaggacaaccaatcccgtggctacggagcagtatggttctgtatctaccaacctccagagaggcaacagacaagcagctaccgcagatgtcaacacacaaggcgttcttccaggcatggtctggcaggacagagatgtgtaccttcaggggcccatctgggcaaagattccacacacggacggacattttcacccctctcccctcatgggtggattcggacttaaacaccctcctccacagattctcatcaagaacaccccggtacctgcgaatccttcgaccaccttcagtgcggcaaagtttgcttccttcatcacacagtactccacgggacaggtcagcgtggagatcgagtgggagctgcagaaggaaaacagcaaacgctggaatcccgaagttcagtacacttccaactacaacaagtctgttaatgtggactttactgtggacactaatggcgtgtattcagagcctcgccccattggcaccagatacctgactcgtaatctgtaa

SEQ ID NO: 580 - protein, 735 aa, Artificial Sequence
  source: /note="Description of Artificial Sequence: Synthetic polypeptide"
MAADGYLPDWLEDTLSEGIRQWWKLKPGPPPPKPAERHKDDSRGLVLPGYKYLGPFNGLDKGEPVNEADAAALEHDKAYDRQLDSGDNPYLKYNHADAEFQERLKEDTSFGGNLGRAVFQAKKRVLEPLGLVEEPVKTAPGKKRPVEHSPVEPDSSSGTGKAGQQPARKRLNFGQTGDADSVPDPQPLGQPPAAPSGLGTNTMATGSGAPMADNNEGADGVGNSSGNWHCDSTWMGDRVITTSTRTWALPTYNNHLYKQISSQSGASNDNHYFGYSTPWGYFDFNRFHCHFSPRDWQRLINNNWGFRPKRLKFKLFNIQVKEVTQNDGTTTIANNLTSTVQVFTDSEYQLPYVLGSAHQGCLPPFPADVFMVPQYGYLTLNNGSQAVGRSSFYCLEYFPSQMLRTGNNFTFSYTFEDVPFHSSYAHSQSLDRLMNPLIDQYLYYLSRTDTPSGTTTQSRLQFSQAGASDIRDQSRNWLPGPCYRQQRVSKTSADNNNSEYSWTGATKYHLNGRDSLVNPGPAMASHKDDEEKFFPQSGVLIFGKQGSEKTSVDIEKVMITDEEEIRTTNPVATEQYGSVSTNLQRGNRQAATADVNTQGVLPGMVWQDRDVYLQGPIWAKIPHTDGHFHPSPLMGGFGLKHPPPQILIKNTPVPANPSTTFSAAKFASFITQYSTGQVSVEIEWELQKENSKRWNPEVQYTSNYNKSVNVDFTVDTNGVYSEPRPIGTRYLTRNL

SEQ ID NO: 581 - DNA, 2601 bp, Artificial Sequence
  source: /note="Description of Artificial Sequence: Synthetic polynucleotide"
ccatcgacgtcagacgcggaagcttcgatcaactacgcggacaggtaccaaaacaaatgttctcgtcacgtgggcatgaatctgatgctgtttccctgcagacaatgcgagagactgaatcagaattcaaatatctgcttcactcacggtgtcaaagactgtttagagtgctttcccgtgtcagaatctcaacccgtttctgtcgtcaaaaaggcgtatcagaaactgtgctacattcatcacatcatgggaaaggtgccagacgcttgcactgcttgcgacctggtcaatgtggacttggatgactgtgtttctgaacaataaatgacttaaaccaggtatgactgccgatggttatcttccagattggctcgaggacaaccttagtgaaggaattcgcgagtggtgggctttgaaacctggagcccctcaacccaaggcaaatcaacaacatcaagacaacgctcgaggtcttgtgcttccgggttacaaataccttggacccggcaacggactcgacaagggggagccggtcaacgcagcagacgcggcggccctcgagcacgacaaggcctacgaccagcagctcaaggccggagacaacccgtacctcaagtacaaccacgccgacgccgagttccaggagcggctcaaagaagatacgtcttttgggggcaacctcgggcgagcagtcttccaggccaaaaagaggcttcttgaacctcttggtctggttgaggaagcggctaagacggctcctggaaagaagaggcctgtagagcagtctcctcaggaaccggactcctccgcgggtattggcaaatcgggtgcacagcccgctaaaaagagactcaatttcggtcagactggcgacacagagtcagtcccagaccctcaaccaatcggagaacctcccgcagccccctcaggtgtgggatctcttacaatggcttcaggtggtggcgcaccagtggcagacaataacgaaggtgccgatggagtgggtagttcctcgggaaattggcattgcgattcccaatggctgggggacagagtcatcaccaccagcacccgaacctgggccctgcccacctacaacaatcacctctacaagcaaatctccaacagcacatctggaggatcttcaaatgacaacgcctacttcggctacagcaccccctgggggtattttgacttcaacagattccactgccacttctcaccacgtgactggcagcgactcatcaacaacaactggggattccggcctaagcaactcaacttcaagctcttcaacattcaggtcaaagaggttacggacaacaatggagtcaagaccatcgccaataaccttaccagcacggtccaggtcttcacggactcagactatcagctcccgtacgtgctcgggtcggctcacgagggctgcctcccgccgttcccagcggacgttttcatgattcctcagtacgggtatctgacgcttaatgatggaagccaggccgtgggtcgttcgtccttttactgcctggaatatttcccgtcgcaaatgctaagaacgggtaacaacttccagttcagctacgagtttgagaacgtacctttccatagcagctacgctcacagccaaagcctggaccgactaatgaatccactcatcgaccaatacttgtactatctctcaaagactattaacggttctggacagaatcaacaaacgctaaaattcagtgtggccggacccagcaacatggctgtccagggaagaaactacatacctggacccagctaccgacaacaacgtgtctcaaccactgtgactcaaaacaacaacagcgaatttgcttggcctggagcttcttcttgggctctcaatggacgtaatagcttgatgaatcctggacctgctatggccagccacaaagaaggagaggaccgtttctttcctttgtctggatctttaatttttggcaaacaaggaactggaagagacaacgtggatgcggacaaagtcatgataaccaacgaagaagaaattaaaactactaacccggtagcaacggagtcctatggacaagtggccacaaaccaccagagtgcccaagcacaggcgcagaccggctgggttcaaaaccaaggaatacttccgggtatggtttggcaggacagagatgtgtacctgcaaggacccatttgggccaaaattcctcacacggacggcaactttcacccttctccgctgatgggagggtttggaatgaagcacccgcctcctcagatcctcatcaaaaacacacctgtacctgcggatcctccaacggccttcaacaaggacaagctgaactctttcatcacccagtattctactggccaagtcagcgtggagatcgagtgggagctgcagaaggaaaacagcaagcgctggaacccggagatccagtacacttccaactattacaagtctaataatgttgaatttgctgttaatactgaaggtgtatatagtgaaccccgccccattggcaccagatacctgactcgtaatctgtaattgcttgttaatcaataaaccgtttaattcgtttcagttgaactgcggcc

SEQ ID NO: 582 - DNA, 2601 bp, Artificial Sequence
  source: /note="Description of Artificial Sequence: Synthetic polynucleotide"
ccatcgacgtcagacgcggaagcttcgatcaactacgcggacaggtaccaaaacaaatgttctcgtcacgtgggcatgaatctgatgctgtttccctgcagacaatgcgagagactgaatcagaattcaaatatctgcttcactcacggtgtcaaagactgtttagagtgctttcccgtgtcagaatctcaacccgtttctgtcgtcaaaaaggcgtatcagaaactgtgctacattcatcacatcatgggaaaggtgccagacgcttgcactgcttgcgacctggtcaatgtggacttggatgactgtgtttctgaacaataaatgacttaaaccaggtatggctgccgatggttatcttccagattggctcgaggacaaccttagtgaaggaattcgcgagtggtgggctttgaaacctggagcccctcaacccaaggcaaatcaacaacatcaagacaacgctcgaggtcttgtgcttccgggttacaaataccttggacccggcaacggactcgacaagggggagccggtcaacgcagcagacgcggcggccctcgagcacgacaaggcctacgaccagcagctcaaggccggagacaacccgtacctcaagtacaaccacgccgacgccgagttccaggagcggctcaaagaagatacgtcttttgggggcaacctcgggcgagcagtcttccaggccaaaaagaggcttcttgaacctcttggtctggttgaggaagcggctaagacggctcctggaaagaagaggcctgtagagcagtctcctcaggaaccggactcctccgcgggtattggcaaatcgggtgcacagcccgctaaaaagagactcaatttcggtcagactggcgacacagagtcagtcccagaccctcaaccaatcggagaacctcccgcagccccctcaggtgtgggatctcttacaatggcttcaggtggtggcgcaccagtggcagacaataacgaaggtgccgatggagtgggtagttcctcgggaaattggcattgcgattcccaatggctgggggacagagtcatcaccaccagcacccgaacctgggccctgcccacctacaacaatcacctctacaagcaaatctccaacagcacatctggaggatcttcaaatgacaacgcctacttcggctacagcaccccctgggggtattttgacttcaacagattccactgccacttctcaccacgtgactggcagcgactcatcaacaacaactggggattccggcctaagcgactcaacttcaagctcttcaacattcaggtcaaagaggttacggacaacaatggagtcaagaccatcgccaataaccttaccagcacggtccaggtcttcacggactcagactatcagctcccgtacgtgctcgggtcggctcacgagggctgcctcccgccgttcccagcggacgttttcatgattcctcagtacgggtatctgacgcttaatgatggaagccaggccgtgggtcgttcgtccttttactgcctggaatatttcccgtcgcaaatgctaagaacgggtaacaacttccagttcagctacgagtttgagaacgtacctttccatagcagctacgctcacagccaaagcctggaccgactaatgaatccactcatcgaccaatacttgtactatctctcaaagactattaacggttctggacagaatcaacaaacgctaaaattcagtgtggccggacccagcaacatggctgtccagggaagaaactacatacctggacccagctaccgacaacaacgtgtctcaaccactgtgactcaaaacaacaacagcgaatttgcttggcctggggcttcttcttgggctctcaatggacgtaatagcttgatgaatcctggacctgctatggccagccacaaagaaggagaggaccgtttctttcctttgtctggatctttaatttttggcaaacaaggaactggaagagacaacgtggatgcggacaaagtcatgataaccaacgaagaagaaattaaaactactaacccggtagcaacggagtcctatggacaagtggccacaaaccaccagagtgcccaagcacaggcgcagaccggctgggttcaaaaccaaggaatacttccgggtatggtttggcaggacagagatgtgtacctgcaaggacccatttgggccaaaattcctcacacgggcggcaactttcacccttctccgctgatgggagggtttggaatgaagcacccgcctcctcagatcctcatcaaaaacacacctgtacctgcggatcctccaacggccttcaacaaggacaagctgaactctttcatcacccagtattctactggccaagtcagcgtggagatcgagtgggagctgcagaaggaaaacagcaagcgctggaacccggagatccagtacacttccaactattacaagtctaataatgttgaatttgctgttaatactggaggtgtatatagtgaaccccgccccattggcaccagatacctgactcgtaatctgtaattgcttgttaatcaataaaccgtttaattcgtttcagttgaactgcggcc

SEQ ID NO: 583 - DNA, 2601 bp, Artificial Sequence
  source: /note="Description of Artificial Sequence: Synthetic polynucleotide"
ccatcgacgtcagacgcggaagcttcgatcaactacgcggacaggtaccaaaacaaatgttctcgtcacgtgggcatgaatctgatgctgtttccctgcagacaatgcgagagactgaatcagaattcaaatatctgcttcactcacggtgtcaaagactgtttagagtgctttcccgtgtcagaatctcaacccgtttctgtcgtcaaaaaggcgtatcagaaactgtgctacattcatcacatcatgggaaaggtgccagacgcttgcactgcttgcgacctggtcaatgtggactcggatgactgtgtttctgaacaataaatgacttaaaccaggtatggctgccgatggttatcttccagattggctcgaggacaaccttagtgaaggaattcgcgagtggtgggctttgaaacctggagcccctcaacccaaggcaaatcaacaacatcaagacaacgctcgaggtcttgtgcttccgggttacaaataccttggacccggcaacggactcgacaagggggagccggtcaacgcagcagacgcggcggccctcgagcacgacaaggcctacgaccagcagctcaaggccggagacaacccgtacctcaagtacaaccacgccgacgccgagttccaggagcggctcaaagaagatacgtcttttgggggcaacctcgggcgagcagtcttccaggccaaaaagaggcttcttgaacctcttggtctggttgaggaagcggctaagacggctcctggaaagaagaggcctgtagagcagtctcctcaggaaccggactcctccgcgggtattgacaaatcgggtgcacagcccgctaaaaagagactcaatttcggtcagactggcgacacagagtcagtcccagaccctcaaccaatcggagaacctcccgcagccccctcaggtgtgggatctcttacaatggcttcaggtggtggcgcaccagtggcagacaataacgaaggtgccgatggagtgggtagttcctcgggaaattggcattgcgattcccaatggctgggggacagagtcatcaccaccagcacccgaacctgggccctgcccacctacaacaatcacctctacaagcaaatctccaacagcacatctggaggatcttcaaatgacaacgcctacttcggctacagcaccccctgggggtattttgacttcaacagattccactgccacttctcaccacgtgactggcagcgactcatcaacaacaactggggattccggcctaagcgactcaacttcaagctcttcaacattcaggtcaaagaggttacggacaacaatggagtcaagaccatcgccaataaccttaccagcacggtccaggtcttcacggactcggactatcagctcccgtacgtgctcgggtcggctcacgagggctgcctcccgccgttcccagcggacgttttcatgattcctcagtacgggtatctgacgcttaatgatggaagccaggccgtgggtcgttcgtccttttactgcctggaatatttcccgtcgcaaatgctaagaacgggtaacaacttccagttcagctacgagtttgagaacgtacctttccatagcagctacgctcacagccaaagcctggaccgactaatgaatccactcatcgaccaatacttgtactatctctcaaagactattaacggttctggacagaatcaacaaacgctaaaattcagtgtggccggacccagcaacatggctgtccagggaagaaactacatacctggacccagctaccgacaacaacgtgtctcaaccactgtgactcaaaacaacaacagcgaatttgcttggcctggagcttcttcttgggctctcaatggacgtaatagcttgatgaatcctggacctgctatggccagccacaaagaaggagaggaccgtttctttcctttgtctggatctttaatttttggcaaacaaggaactggaagagacaacgtggatgcggacaaagtcatgataaccaacgaagaagaaattaaaactactaacccggtagcaacggagtcctatggacaagtggccacaaaccaccagagtgcccaagcacaggcgcagaccggctgggttcaaaaccaaggaatacttccgggtatggtttggcaggacagagatgtgtacctgcaaggacccatttgggccaaaattcctcacacggacggcaactttcacccttctccgctgatgggagggtttggaatgaagcacccgcctcctcagatcctcatcaaaaacacacctgtacctgcggatcctccaacggccttcaacaaggacaagctgaactctttcatcacccagtattctactggccaagtcagcgtggagatcgagtgggagctgcagaaggaaaacagcaagcgctggaacccggagatccagtacacttccaactattacaagtctaataatgttgaatttgctgttaatactgaaggtgtatatagtgaaccccgccccattggcaccagatacctgactcgtaatctgtaattgcttgttaatcaataaaccgtttaattcgtttcagttgaactgcggcc

SEQ ID NO: 584 - DNA, 2601 bp, Artificial Sequence
  source: /note="Description of Artificial Sequence: Synthetic polynucleotide"
ccatcgacgtcagacgcggaagcttcgatcaactacgcggacaggtaccaaaacaaatgttctcgtcacgtgggcatgaatctgatgctgtttccctgcagacaatgcgagagactgaatcagaattcaaatatctgcttcactcacggtgtcaaagactgtttagagtgctttcccgtgtcagaatctcaacccgtttctgtcgtcaaaaaggcgtatcagaaactgtgctacattcatcacatcatgggaaaggtgccagacgcttgcactgcttgcgacctggtcaatgtggacttggatgactgtgtttctgaacaataaatgacttaaaccaggtatggctgccgatggttatcttccagattggctcgaggacaaccttagtgaaggaattcgcgagtggtgggctttgaaacctggagcccctcaacccaaggcaaatcaacaacatcaagacaacgctcgaggtcttgtgcttccgggttacaaataccttggacccggcaacggactcgacaagggggagccggtcaacgcagcagacgcggcggccctcgagcacgacaaggcctacgaccagcagctcaaggccggagacaacccgtacctcaagtacaaccacgccgacgccgagttccaggagcggctcaaagaagatacgtcttttgggggcaacctcgggcgagcagtcctccaggccaaaaagaggcttcttgaacctcttggtctggttgaggaagcggctaagacggctcctggaaagaagaggcctgtagagcagtctcctcaggaaccggactcctccgcgggtattggcaaatcgggtgcacagcccgctaaaaagagactcaatttcggtcagactggcgacacagagtcagtcccagaccctcaaccaatcggagaacctcccgcagccccctcaggtgtgggatctcttacaatggcttcaggtggtggcgcaccagtggcagacaataacgaaggtgccgatggagtgggtagttcctcgggaaattggcattgcgattcccaatggctgggggacagagtcatcaccaccagcacccgaacctgggccctgcccacctacaacaatcacctctacaagcaaatctccaacagcacatctggaggatcttcaaatgacaacgcctacttcggctacagcaccccctgggggtattttgacttcaacagattccactgccacttctcaccacgtgactggcagcgactcatcaacaacaactggggattccggcctaagcgactcaacttcaagctcttcaacattcaggtcaaagaggttacggacaacaatggagtcaagaccatcgccaataaccttaccagcacggtccaggtcttcacggactcagactatcagctcccgtacgtgctcgggtcggctcacgagggctgcctcccgccgttcccagcggacgttttcatgattcctcagtacgggtatctgacgcttaatgatggaagccaggccgtgggtcgttcgtccttttactgcctggaatatttcccgtcgcaaatgctaagaacgggtaacaacttccagttcagctacgagtttgagaacgtacctttccatagcagctacgctcacagccaaagcctggaccgactaatgaatccactcatcgaccaatacttgtactatctctcaaagactattaacggttctggacagaatcaacaaacgctaaaattcagtgtggccggatccagcaacatggctgtccagggaagaaactacatacctggacccagctaccgacaacaacgtgtctcaaccactgtgactcaaaacaacaacagcgaatttgcttggcctggagcttcttcttgggctctcaatggacgtaatagcttgatgaatcctggacctgctatggccagccacaaagaaggagaggaccgtttctttcctttgtctggatctttaatttttggcaaacaaggaactggaagagacaacgtggatgcggacaaagtcatgataaccaacgaagaagaaattaaaactactaacccggtagcaacggagtcctatggacaagtggccacaaaccaccagagtgcccaagcacaggcgcagaccggctgggttcaaaaccaaggaatacttccaggtatggtttggcaggacagagatgtgtacctgcaaggacccatttgggccaaaattcctcacacggacggcaactttcacccttctccgctgatgggagggtttggaatgaagcacccgcctcctcagatcctcatcaaaaacacacctgtacctgcggatcctccaacggccttcaacaaggacaagctgaactctttcatcacccagtattctactggccaagtcagcgtggagatcgagtgggagctgcagaaggaaaacagcaagcgctggaacccggagatccagtacacttccaactattacaagtctaataatgttgaatttgctgttaatactgaaggtgtatatagtgaaccccgccccattggcaccagatacctgactcgtaatctgtaattgcttgttaatcaataaaccgtttaattcgtttcagttgaactgcggcc

SEQ ID NO: 585 - DNA, 2601 bp, Artificial Sequence
  source: /note="Description of Artificial Sequence: Synthetic polynucleotide"
ccatcgacgtcagacgcggaagcttcgatcaactacgcggacaggtaccaaaacaaatgttctcgtcacgtgggcatgaatctgatgctgtttccctgcagacaatgcgagagactgaatcagaattcaaatatctgcttcactcacggtgtcaaagactgtttagagtgctttcccgtgtcagaatctcaacccgtttctgtcgtcaaaaaggcgtatcagaaactgtgctacattcatcacatcatgggaaaggtgccagacgcttgcactgcttgcgacctggtcaatgtggacttggatgactgtgtttctgaacaataaatgacttaaaccaggtatggctgccgatggttatcttccagattggctcgaggacaaccttagtgaaggaattcgcgagtggtgggctttgaaacctggagcccctcaacccaaggcaaatcaacaacatcaagacaacgctcgaggtcttgtgcttccgggttacaaataccttggacccggcaacggactcgacaagggggagccggtcaacgcagcagacgcggcggccctcgagcacgacagggcctacgaccagcagctcaaggccggagacaacccgtacctcaagtacaaccacgccgacgccgagttccaggagcggctcaaagaagatacgtcttttgggggcaacctcgggcgagcagtcttccaggccaaaaagaggcttcttgaacctcttggtctggttgaggaagcggctaagacggctcctggaaagaagaggcctgtagagcagtctcctcaggaaccggactcctccgcgggtattggcaaatcgggtgcacagcccgctaaaaagagactcaatttcggtcagactggcgacacagagtcagtcccagaccctcaaccaatcggagaacctcccgcagccccctcaggtgtgggatctcttacaatggcttcaggtggtggcgcaccagtggcagacaataacgaaggtgccgatggagtgggtagttcctcgggaaattggcattgcgattcccaatggctgggggacagagtcatcaccaccagcacccgaacctgggccctgcccacctacaacaatcacctctacaagcaaatctccaacagcacatctggaggatcttcaaatgacaacgcctacttcggctacagcaccccctgggggtattttgacttcaacagattccactgccacttctcaccacgtgactggcagcgactcatcaacaacaactggggattccggcctaagcgactcaacttcaagctcttcaacattcaggtcaaagaggttacggacaacaatggagtcaagaccatcgccaataaccttaccagcacggtccaggtcttcacggactcagactatcagctcccgtacgtgctcgggtcggctcacgagggctgcctcccgccgttcccagcggacgttttcatgattcctcagtacgggtatctgacgcttaatgatggaagccaggccgtgggtcgttcgtccttttactgcctggaatatttcccgtcgcaaatgctaagaacgggtaacaacttccagttcagctacgagtttgagaacgtacctttccatagcagctacgctcacagccaaagcctggaccgactaatgaatccactcatcgaccaatacttgtactatctctcaaagactattaacggttctggacagaatcaacaaacgctaaaattcagtgtggccggacctagcaacatggctgtccagggaagaaactacatacctggacccagctaccgacaacaacgtgtctcaaccactgtgactcaaaacaacaacagcgaatttgcttggcctggagcttcttcttgggctctcaatggacgtaatagcttgatgaatcctggacctgctatggccagccacaaagaaggagaggaccgtttctttcctttgtctggatctttaatttttggcaaacaaggaactggaagagacaacgtggatgcggacaaagtcatgataaccaacgaagaagaaattaaaactactaacccggtagcaacggagtcctatggacaagtggccacaaaccaccagagtgcccaagcacaggcgcagaccggctgggttcaaaaccaaggaatacttccgggtatggtttggcaggacagagatgtgtacctgcaaggacccatttgggccaaaattcctcacacggacggcaactttcacccttctccgctgatgggagggtttggaatgaagcacccgcctcctcagatcctcatcaaaaacacacctgtacctgcggatcctccaacggccttcaacaaggacaagctgaactctttcatcacccagtattctactggccaagtcagcgtggagatcgagtgggagctgcagaagaaaaacagcaagcgctggaacccggagatccagtacacttccaactattacaagtctaataatgttgaatttgctgttaacactgaaggtgtatatagtgaaccccgccccattggcaccagatacctgactcgtaatctgtaattgcttgttaatcaataaaccgtttaattcgtttcagttgaactgcggcc

SEQ ID NO: 586 - DNA, 2601 bp, Artificial Sequence
  source: /note="Description of Artificial Sequence: Synthetic polynucleotide"
ccatcgacgtcagacgcggaagcttcgatcaactacgcggacaggtaccaaaacaaatgttctcgtcacgtgggcatgaatctgatgctgtttccctgcagacaatgcgagagactgaatcagaattcaaatatctgcttcactcacggtgtcaaagactgtttagagtgctttcccgtgtcagaatctcaacccgtttctgtcgtcaaaaaggcgtatcagaaactgtgctacattcatcacatcatgggaaaggtgccagacgcttgcactgcttgcgacctggtcaatgtggacttggatgactgtgtttctgaacaataaatgacttaaaccaggtatggctgccgatggttatcttccagattggctcgaggacaaccttagtgaaggaattcgcgagtggtgggctttgaaacctggagcccctcaacccaaggcaaatcaacaacatcaagacaacgctcgaggtcttgtgcttccgggttacaaataccttggacccggcaacggactcgacaagggggagccggtcaacgcagcagacgcggcggccctcgagcacgacaaggcctacgaccagcagctcaaggccggagacaacccgtacctcaagtacaaccacgccgacgccgagttccaggagcggctcaaagaagatacgtcttttgggggcaacctcgggcgagcagtcttccaggccaaaaagaggcttcttgaacctcttggtctggttgaggaagcggctaagacggctcctggaaagaagaggcctgtagagcagtctcctcaggaaccggactcctccgcgggtattggcaaatcgggtgcacagcccgctaaaaagagactcaatttcggtcagactggcgacacagagtcagtcccagaccctcaaccaatcggagaacctcccgcagccccctcaggtgtgggatctcttacaatggcttcaggtggtggcgcaccagtggcagacaataacgaaggtgccgatggagtgggtagttcctcgggaaattggcattgcgattcccaatggctgggggacagagtcatcaccaccagcacccgaacctgggccctgcccacctacaacaatcacctctacaagcaaatctccaacagcacatctggaggatcttcaaatgacaacgcctacttcggctacagcaccccctgggggtattttgacttcaacagattccactgccacttctcaccacgtgactggcagcgactcatcaacaacaactggggattccggcctaagcgactcaacttcaagctcttcaacattcaggtcaaagaggttacggacaacaatggagtcaagaccatcgccaataaccttaccagcacggtccaggtcttcacggactcagactatcagctcccgtacgtgctcgggtcggctcacgagggctgcctcccgccgttcccagcggacgttttcatgattcctcagtacgggtatctgacgcttaatgatggaagccaggccgtgggtcgttcgtccttttactgcctggaatatttcccgtcgcaaatgctaagaacgggtaacaacttccagttcagctacgagtttgagaacgtacctttccatagcagctacgctcacagccaaagcctggaccgactaatgaatccactcatcgaccaatacttgtactatctctcaaagactattaacggttctggacagaatcaacaaacgctaaaattcagtgtggccggacccagcaacatggctgtccagggaagaaactacatacctggacccagctaccgacaacaacgtgtctcaaccactgtgactcaaaacaacaacagcgaatttgcttggcctggagcttcttcttgggctctcaatggacgtaatagcttgatgaatcctggacctgctatggccagccacaaagaaggagaggaccgtttctttcctttgtctggatctttaatttttggcaaacaaggaactggaagagacaacgtggatgcggacaaagtcatgataaccaacgaagaagaaattaaaactactaacccggtagcaacggagtcctatggacaagtggccacaaaccaccagagtgcccaagcacgggcgcagaccggctgggttcaaaaccaaggaatacttccgggtatggtttggcaggacagagatgtgtacctgcaaggacccatttgggccaaaattcctcacacggacggcaactttcacccttctccgctgatgggagggtttggaatgaagcacccgcctcctcagatcctcatcaaaaacacacctgtacctgcggatcctccaacggccttcaacaaggacaagctgaactctttcatcacccagtattctactggccaagtcagcgtggagatcgagtgggagctgcagaaggaaaacagcaagcgctggaacccggagatccagtacacttccaactattacaagtctaataatgttgaatttgctgttaatactgaaggtgtatatagtgaaccccgccccattggcaccagatacctgactcgtaatctgtaattgcttgttaatcaataaaccgtttaattcgtttcagttgaactgcggcc

SEQ ID NO: 587 - DNA, 2601 bp, Artificial Sequence
  source: /note="Description of Artificial Sequence: Synthetic polynucleotide"
ccatcgacgtcagacgcggaagcttcgatcaactacgcggacaggtaccaaaacaaatgttctcgtcacgtgggcatgaatctgatgctgtttccctgcagacaatgcgagagactgaatcagaattcaaatatctgcttcactcacggtgtcaaagactgtttagagtgctttcccgtgtcagaatctcaacccgtttctgtcgtcaaaaaggcgtatcagaaactgtgctacattcatcacatcatgggaaaggtgccagacgcttgcactgcttgcgacctggtcaatgtggacttggatgactgtgtttctgaacaataaatgacttaaaccaggtatggctgccgatggttatcttccagattggctcgaggacaaccttagtgaaggaattcgcgagtggtgggctttgaaacctggagcccctcaacccaaggcaaatcaacaacatcaagacaacgctcgaggtcttgtgcttccgggttacaaataccttggacccggcaacggactcgacaagggggagccggtcaacgcagtagacgcggcggccctcgagcacgacaaggcctacgaccagcagctcaaggccggagacaacccgtacctcaagtacaaccacgccgacgccgagttccaggagcggctcaaagaagatacgtcttttgggggcaacctcgggcgagcagtcttccaggccaaaaagaggcttcttgaacctcttggtctggttgaggaagcggctaagacggctcctggaaagaagaggcctgtagagcagtctcctcaggaaccggactcctccgcgggtattggcaaatcgggtgcacagcccgctaaaaagagactcaatttcggtcagactggcgacacagagtcagtcccagaccctcaaccaatcggagaacctcccgcagccccctcaggtgtgggatctcttacaatggcttcaggtggtggcgcaccagtggcagacaataacgaaggtgccgatggagtgggtagttcctcgggaaattggcattgcgattcccaatggctgggggacagagtcatcaccaccagcacccgaacctgggccctgcccacctacaacaatcacctctacaagcaaatctccaacagcacatctggaggatcttcaaatgacaacgcctacttcggctacagcaccccctgggggtattttgacttcaacagattccactgccacttctcaccacgtgactggcagcgactcatcaacaacaactggggatttcggcctaagcgactcaacttcaagctcttcaacattcaggtcaaagaggttacggacaacaatggagtcaagaccatcgccaataaccttaccagcacggtccaggtcttcacggactcagactatcagctcccgtacgtgctcgggtcggctcacgagggctgcctcccgccgttcccagcggacgttttcatgattcctcagtacgggtatctgacgcttaatgatggaagccaggccgtgggtcgttcgtccttttactgcctggaatatttcccgtcgcaaatgctaagaacgggtaacaacttccagttcagctacgagtttgagaacgtacctttccatagcagctacgctcacagccaaagcctggaccgactaatgaatccactcatcgaccaatacttgtactatctctcaaagactattaacggttctggacagaatcaacaaacgctaaaattcagtgtggccggacccagcaacatggctgtccagggaagaaactacatacctggacccagctaccgacaacaacgtgtctcaaccactgtgactcaaaacaacaacagcgaatttgcttggcctggagcttcttcttgggctctcaatggacgtaatagcttgatgaatcctggacctgctatggccagccacaaagaaggagaggaccgtttctttcctttgtctggatctttaatttttggcaaacaaggaactggaagagacaacgtggatgcggacaaagtcatgataaccaacgaagaagaaattaaaactactaacccggtagcaacggagtcctatggacaagtggccacaaaccaccagagtgcccaagcacaggcgcagaccggctgggttcaaaaccaaggaatacttccgggtatggtttggcaggacagagatgtgtacctgcaaggacccatttgggccaaaattcctcacacggacggcaactttcacccttctccgctgatgggagggtttggaatgaagcacccgcctcctcagatcctcatcaaaaacacacctgtacctgcggatcctccaacggccttcaacaaggacaagctgaactctttcatcacccagtattctactggccaagtcagcgtggagatcgagtgggagctgcagaaggaaaacagcaagcgctggaacccggagatccagtacacttccaactattacaagtctaataatgttgaatttgctgttaatactgaaggtgtatatagtgaaccccgccccattggcaccagatacctgactcgtaatctgtaattgcttgttaatcaataaaccgtttaattcgtttcagttgaactgcggcc

SEQ ID NO: 588 - DNA, 2580 bp, Artificial Sequence
  source: /note="Description of Artificial Sequence: Synthetic polynucleotide"
ccatcgacgtcagacgcggaagcttcgatcaactacgcggacaggtaccaaaacaaatgttctcgtcacgtgggcatgaatctgatgctgtttccctgcagacaatgcgagagactgaatcagaattcaaatatctgcttcactcacggtgtcaaagactgtttagagtgctttcccgtgtcagaatctcaacccgtttctgtcgtcaaaaaggcgtatcagaaactgtgctacattcatcacatcatgggaaaggtgccagacgcttgcactgcttgcgacctggtcaatgtggacttggatgactgtgtttctgaacaataaatgacttaaaccaggtatggctgccgatggttatcttccagattggctcgaggacaaccttagtgaaggaattcgcgagtggtgggctttgaaacctggagcccctcaacccaaggcaaatcaacaacatcaagacaacgctcgaggtcttgtgcttccgggttacaaataccttggacccggcaacggactcgacaagggggagccggtcaacgcagcagacgcggcggccctcgagcacgacaaggcctacgaccagcagctcaaggccggagacaacccgtacctcaagtacaaccacgccgacgccgagttccaggagcggctcaaagaagatacgtcttttgggggcaacctcgggcgagcagtcttccaggccaaaaagaggcttcttgaacctcttggtctggttgaggaagcggctaagacggctcctggaaagaagaggcctgtagagcagtctcctcgggaaccggactcctccgcgggtattggcaaatcgggtgcacagcccgctaaaaagagactcaatttcggtcagactggcgacacagagtcagtcccagaccctcaaccaatcggagaacctcccgcagccccctcaggtgtgggatctcttacaatggcttcaggtggtggcgcaccagtggcagacaataacgaaggtgccgatggagtgggtagttcctcgggaaattggcattgcgattcccaatggctgggggacagagtcatcaccaccagcacccgaacctgggccctgcccacctacaacaatcacctctacaagcaaatctccaacagcacatctggaggatcttcaaatgacaacgcctacttcggctacagcaccccctgggggtattttgacttcaacagattccactgccacttctcaccacgtgactggcagcgactcatcaacaacaactggggattccggcctaagcgactcaacttcaagctcttcaacattcaggtcaaagaggttacggacaacaatggagtcaagaccatcgccaataaccttaccagcacggtccaggtcttcacggactcagactatcagctcccgtacgtgctcgggtcggctcacgagggctgcctcccgccgttcccagcggacgttttcatgattcctcagtacgggtatctgacgcttaatgatggaagccaggccgtgggtcgttcgtccttttactgcctggaatatttcccgtcgcaaatgctaagaacgggtaacaacttccagttcagctacgagtttgagaacgtacctttccatagcagctacgctcacagccaaagcctggaccgactaatgaatccactcatcgaccaatacttgtactatctctcaaagactattaacggttctggacagaatcaacaaacgctaaaattcagtgtggccggacccagcaacatggctgtccagggaagaaactacatacctggacccagctaccgacaacaacgtgtctcaaccactgtgactcaaaacaacaacagcgaatttgcttggcctggagcttcttcttgggctctcaatggacgtaatagcttgatgaatcctggacctgctatggccagccacaaagaaggagaggaccgtttctttcctttgtctggatctttaatttttggcaaacaaggaactggaagagacaacgtggatgcggacaaagtcatgataaccaacgaagaagaaattaaaactactaacccggtagcaacggagtcctatggacaagtggccacaaaccaccagagtgcccaagcacaggcgcagaccggctgggttcaaaaccaaggaatacttccgggtatggtttggcaggacagagatgtgtacctgcaaggacccatttgggccaaaattcctcacacggacggcaactttcacccttctccgctgatgggagggtttggaatgaagcacccgcctcctcagatcctcatcaaaaacacacctgtacctgcggatcctccaacggccttcaacaaggacaagctgaactctttcatcacccagtattctactggccaagtcagcgtggagatcgagtgggaactgcagaaggaaaacagcaagcgctggaacccggagatccagtacacttccaactattacaagtctaataatgttgaatttgctgttaatactgaaggtgtatatagtgaaccccgccccattggcaccagatacctgactcgtaatctgtaattgcttgttaatcaataaaccgtttaatt

SEQ ID NO: 589 - DNA, 2601 bp, Artificial Sequence
  source: /note="Description of Artificial Sequence: Synthetic polynucleotide"
ccatcgacgtcagacgcggaagcttcgatcaactacgcggacaggtaccaaaacaaatgttctcgtcacgtgggcatgaatctgatgctgtttccctgcagacaatgcgagagactgaatcagaattcaaatatctgcttcactcacggtgtcaaagactgtttagagtgctttcccgtgtcagaatctcaacccgtttctgtcgtcaaaaaggcgtatcagaaactgtgctacattcatcacatcatgggaaaggtgccagacgcttgcactgcttgcgacctggtcaatgtggacttggatgactgtgtttctgaacaataaatgacttaaaccaggtatggctgccgatggttatcttccagattggctcgaggacaaccttagtgaaggaattcgcgagtggtgggctttgaaacctggagcccctcaacccaaggcaaatcaacaacatcaagacaacgctcgaggtcttgtgcttccgggttacaaataccttggacccggcaacggactcgacaagggggagccggtcaacgcagcagacgcggcggccctcgagcacgacaaggcctacgaccagcagctcaaggccggagacaacccgtacctcaagtacaaccacgccgacgccgagttccaggagcggctcaaagaagatacgtcttttgggggcaacctcgggcgagcagtctttcaggccaaaaagaggcttcttgaacctcttggtctggttgaggaagcggctaagacggctcctggaaagaagaggcctgtagagcagtctcctcaggaaccggactcctccgcgggtattggcaaatcgggtgcacagcccgctaaaaagagactcaatttcggtcagactggcgacacagagtcagtcccagaccctcaaccaatcggagaacctcccgcagccccctcaggtgtgggatctcttacaatggcttcatgtggtggcgcaccagtggcagacaataacgaaggtgccgatggagtgggtagttcctcgggaaattggcattgcgattcccaatggctgggggacagagtcatcaccaccagcacccgaacctgggccctgcccacctacaacaatcacctctacaagcaaatctccaacagcacatctggaggatcttcaaatgacaacgcctacttcggctacagcaccccctgggggtattttgacttcaacagattccactgccacttctcaccacgtgactggcagcgactcatcaacaacaactggggattccggcctaagcgactcaacttcaagctcttcaacattcaggtcaaagaggttacggacaacaatggagtcaagaccatcgccaataaccttaccagcacggtccaggtcttcacggactcagactatcagctcccgtacgtgctcgggtcggctcacgagggctgcctcccgccgttcccagcggacgttttcatgattcctcagtacgggtatctgacgcttaatgatggaagccaggccgtgggtcgttcgtccttttactgcctggaatatttcccgtcgcaaatgctaagaacgggtaacaacttccagttcagctacgagtttgagaacgtacctttccatagcagctacgctcacagccaaagcctggaccgactaatgaatccactcatcgaccaatacttgtactatctctcaaagactattaacggttctggacagaatcaacaaacgctaaaattcagtgtggccggacccagcaacatggctgtccagggaagaaactacatacctggacccagctaccgacaacaacgtgtctcaaccactgtgactcaaaacaacaacagcgaatttgcttggcctggagcttcttcttgggctctcaatggacgtaatagcttgatgaatcctggacctgctatggccagccacaaagaaggagaggaccgtttctttcctttgtctggatctttaatttttggcaaacaaggaactggaagagacaacgtggatgcggacaaagtcatgataaccaacgaagaagaaattaaaactactaacccggtagcaacggagtcctatggacaagtggccacaaaccaccagagtgcccaagcacaggcgcagaccggctgggttcaaaaccaaggaatacttccgggtatggtttggcaggacagagatgtgtacctgcaaggacccatttgggccaaaattcctcacacggacggcaactttcacccttctccgctgatgggagggtttggaatgaagcacccgcctcctcagatcctcatcaaaaacacacctgtacctgcggatcctccaacggccttcaacaaggacaagctgaactctttcatcacccagtattctactggccaagtcagcgtggagatcgagtgggagctgcagaaggaaaacagcaagcgctggaacccggagatccagtacacttccaactattacaagtctaataatgttgaatttgctgttaatactgaaggtgtatatagtgaaccccgccccattggcaccagatacctgactcgtaatctgtaattgcttgttaatcaataaaccgtttaattcgtttcagttgaactgcggcc

SEQ ID NO: 590 - DNA, 2601 bp, Artificial Sequence
  source: /note="Description of Artificial Sequence: Synthetic polynucleotide"
ccatcgacgtcagacgcggaagcttcgatcaactacgcggacaggtaccaaaacaaatgttctcgtcacgtgggcatgaatctgatgctgtttccctgcagacaatgcgagagactgaatcagaattcaaatatctgcttcactcacggtgtcaaagactgtttagagtgctttcccgtgtcagaatctcaacccgtttctgtcgtcaaaaaggcgtatcagaaactgtgctacattcatcacatcatgggaaaggtgccagacgcttgcactgcttgcgacctggtcaatgtggacttggatgactgtgtttctgaacaataaatgacttaaaccaggtatggctgccgatggttatcttccagattggctcgaggacaaccttagtgaaggaattcgcgagtggtgggctttgaaacctggagcccctcaacccaaggcaaatcaacaacatcaagacaacgctcgaggtcttgtgcttccgggttacaaataccttggacccggcaacggactcgacaagggggagccgatcaacgcagcagacgcggcggccctcgagcacgacaaggcctacgaccagcagctcaaggccggagacaacccgtacctcaagtacaaccacgccgacgccgagttccaggagcggctcaaagaagatacgtcttttgggggcaacctcgggcgagcagtcttccaggccaaaaagaggcttcttgaacctcttggtctggttgaggaagcggctaagacggctcctggaaagaagaggcctgtagagcagtctcctcaggaaccggactcctccgcgggtattggcaaatcgggtgcacagcccgctaaaaagagactcaatttcggtcagactggcgacacagagtcagtcccagaccctcaaccaatcggagaacctcccgcagccccctcaggtgtgggatctcttacaatggcttcaggtggtggcgcaccagtggcagacaataacgaaggtgccgatggagtgggtagttcctcgggaaattggcattgcgattcccaatggctgggggacagagtcatcaccaccagcacccgaacctgggccctgcccacctacaacaatcacctctacaagcaaatctccaacagcacatctggaggatcttcaaatgacaacgcctacttcggctacagcaccccctgggggtattttgacttcaacagattccactgccacttctcaccacgtgactggcagcgactcatcaacaacaactggggattccggcctaagcgactcaacttcaagctcttcaacattcaggtcaaagaggttacggacaacaatggagtcaagaccatcgccaataaccttaccagcacggtccaggtcttcacggactcagactatcagctcccgtacgtgctcgggtcggctcacgagggctgcctcccgccgttcccagcggacgttttcatgattcctcagtacgggtatctgacgcttaatgatggaagccaggccgtgggtcgttcgtccttttactgcctggaatatttcccgtcgcaaatgctaagaacgggtaacaacttccagttcagctacgagtttgagaacgtacctttccatagcagctacgctcacagccaaagcctggaccgactaatgaatccactcatcgaccaatacttgtactatctctcaaagactattaacggttctggacagaatcaacaaacgctaaaattcagtgtggccggacccagcaacatggctgtccagggaagaaactacatacctggacccagctaccgacaacaacgtgtctcaaccactgtgactcaaaacaacaacagcgaatttgcttggcctggagcttcttcttgggctctcaatggacgtaatagcttgatgaatcctggacctgctatggccagccacaaagaaggagaggaccgtttctttcctttgtctggatctttaatttttggcaaacaaggaactggaagagacaacgtggatgcggacaaagtcatgataaccaacgaagaagaaattaaaactactaacccggtagcaacggagtcctatggacaagtggccacaaaccaccagagtgcccaagcacaggcgcagaccggctgggttcaaaaccaaggaatacttccgggtatggtttggcaggacagagatgtgtacctgcaaggacccatttgggccaaaattcctcacacgtacggcaactttcacccttctccgctgatgggagggtttggaatgaagcacccgcctcctcagatcctcatcaaaaacacacctgtacctgcggatcctccaacggccttcaacaaggacaagctgaactctttcatcacccagtattctactggccaagtcagcgtggagatcgagtgggagctgcagaaggaaaacagcaagcgctggaacccggagatccagtacacttccaactattacaagtctaataatgttgaatttgctgttaatactgaaggtgtatatagtgaaccccgccccattggcaccagatacctgactcgtaatctgtaattgcttgttaatcaataaaccgtttaattcgtttcagttgaactgcggcc

SEQ ID NO: 591 - DNA, 2601 bp, Artificial Sequence
  source: /note="Description of Artificial Sequence: Synthetic polynucleotide"
ccatcgacgtcagacgcggaagcttcgatcaactacgcggacaggtaccaaaacaaatgttctcgccacgtgggcatgaatctgatgctgtttccctgcagacaatgcgagagactgaatcagaattcaaatatctgcttcactcacggtgtcaaagactgtttagagtgctttcccgtgtcagaatctcaacccgtttctgtcgtcaaaaaggcgtatcagaaactgtgctacattcatcacatcatgggaaaggtgccagacgcttgcactgcttgcgacctggtcaatgtggacttggatgactgtgtttctgaacaataaatgacttaaaccaggtatggctgccgatggttatcttccagattggctcgaggacaaccttagtgaaggaattcgcgagtggtgggctttgaaacctggagcccctcaacccaaggcaaatcaacaacatcaagacaacgctcgaggtcttgtgcttccgggttacaaataccttggacccggcaacggactcgacaagggggagccggtcaacgcagcagacgcggcggccctcgagcacgacaaggcctacgaccagcagctcaaggccggagacaacccgtacctcaagtacaaccacgccgacgccgagttccaggagcggctcaaagaagatacgtcttttgggggcaacctcgggcgagcagtcttccaggccaaaaagaggcttcttgaacctcttggtctggttgaggaagcggctaagacggctcctggaaagaagaggcctgtagagcagtctcctcaggaaccggactcctccgcgggtattggcaaatcgggtgcacagcccgctaaaaagagactcaatttcggtcagactggcgacacagagtcagtcccagaccctcaaccaatcggagaacctcccgctgccccctcaggtgtgggatctcttacaatggcttcaggtggtggcgcaccagtggcagacaataacgaaggtgccgatggagtgggtagttcctcgggaaattggcattgcgattcccaatggctgggggacagagtcatcaccaccagcacccgaacctgggccctgcccacctacaacaatcacctctacaagcaaatctccaacagcacatctggaggatcttcaaatgacaacgcctacttcggctacagcaccccctgggggtattttgacttcaacagattccactgccacttctcaccacatgactggcagcgactcatcaacaacaactggggattccggcctaagcgactcaacttcaagctcttcaacattcaggtcaaagaggttacggacaacaatggagtcaagaccatcgccaataaccttaccagcacggtccaggtcttcacggactcagactatcagctcccgtacgtgctcgggtcggctcacgagggctgcctcccgccgttcccagcggacgttttcatgattcctcagtacgggtatctgacgcttaatgatggaagccaggccgtgggtcgttcgtccttttactgcctggaatatttcccgtcgcaaatgctaagaacgggtaacaacttccagttcagctacgagtttgagaacgtacctttccatagcagctacgctcacagccaaagcctggaccgactaatgaatccactcatcgaccaatacttgtactatctctcaaagactattaacggttctggacagaatcaacaaacgctaaaattcaatgtggccggacccagcaacatggctgtccagggaagaaactacatacctggacccagctaccgacaacaacgtgtctcaaccactgtgactcaaaacaacaacagcgaatttgcctggcctagagcttcttcttgggctctcaatggacgtaatagcttgatgaatcctggacctgctatggccagccacaaagaaggagaggaccgtttctttcctttgtctggatctttaatttttggcaaacaaggaactggaagagacaacgtggatgcggacaaagtcatgataaccaacgaagaagaaattaaaactactaacccggtagcaacggagtcctatggacaagtggccacaaaccaccagagtgcccaagcacaggcgcagaccggctgggttcaaaaccaaggaatacttccgggtatggtttggcaggacagagatgtgtacctgcaaggacccatttgggccaaaattcctcacacggacggcaactttcacccttctccgctgatgggagggtttggaatgaagcacccgcctcctcagatcctcatcaaaaacacacctgtacctgcggatcctccaacggccttcaacaaggacaagctgaactctttcatcacccagtattctactggccaagtcagcatggagatcgagtgggagctgcagaaggaaaacagcaagcgctggaacccggagatccagtacacttccaactattacaagtctaataatgttgaatttgctgttaatactgaaggtgtatatagtgaaccccgccccattggcaccagatacctgactcgtaatctgtaattgcttgttaatcaataaaccgtttaattcgtttcagttgaactgcggcc

SEQ ID NO: 592 - DNA, 2601 bp, Artificial Sequence
  source: /note="Description of Artificial Sequence: Synthetic polynucleotide"
ccatcgacgtcagacgcggaagcttcgatcaactacgcggacaggtaccaaaacaaatgttctcgtcacgtgggcatgaatctgatgctgtttccctgcagacaatgcgagagactgaatcagaattcaaatatctgcttcactcacggtgtcaaagactgtttagagtgctttcccgtgtcagaatctcaacccgtttctgtcgtcaaaaaggcgtatcagaaactgtgctacattcatcacatcatgggaaaggtgccagacgcttgcactgcttgcgacctggtcaatgtggacttggatgactgtgtttctgaacaataaatgacttaaaccaggtatggctgccgatggttatcttccagattggctcgaggacaaccttagtgaaggaattcgcgagtggtgggctttgaaacctggagcccctcaacccaaggcaaatcaacaacatcaagacaacgctcgaggtcttgtgcttccgggttacaaataccttggacccggcaacggactcgacaagggggagccggtcaacgcagcagacgcggcggccctcgagcacgacaaggcctacgaccagcagctcaaggccggagacaacccgtacctcaagtacaaccacgccgacgccgagttccaggagcggctcaaagaagatacgtcttttgggggcaacctcgggcgagcagtcttccaggccaaaaagaggcttcttgaacctcttggtctggttgaggaagcggctaagacggctcctggaaagaagaggcctgtagagcagtctcctcaggaaccggactcctccgcgggtattggcaaatcgggtgcacagcccgctaaaaagagactcaatttcggtcagactggcgacacagagtcagtcccagaccctcaaccaatcggagaacctcccgcagccccctcaggtgtgggatctcttacaatggcttcaggtggtggcgcaccagtggcagacaataacgaaggtgccgatggagtgggtagttcctcgggaaattggcattgcgattcccaatggctgggggacagagtcatcaccaccagcacccgaacctgggccctgcccacctacaacaatcacctctacaagcaaatctccaacagcacatctggaggatcttcaaatgacaacgcctacttcggctacagcaccccctgggggtattttgacttcaacagattccactgccacttctcaccacgtgactggcagcgactcatcaacaacaactggggattccggcctaagcgactcaacttcaagctcttcaacattcaggtcaaagaggttacggacaacaatggagtcaagaccatcgccaataaccttaccagcacggtccaggtcttcacggactcagactatcagctcccgtacgtgctcgggtcggctcacgagggctgcctcccgccgttcccagcggacgttttcatgattcctcagtacgggtatctgacgcttaatgatggaagccaggccgtgggtcgttcgtccttttactgcctggaatatttcccgtcgcaaatgctaagaacgggtaacaacttccagttcagctacgagtttgagaacgtacctttccatagcagctacgctcacagccaaagcctggaccgactaatgaatccactcatcgaccaatacttgtactatctctcaaagactattaacggttctggacagaatcaacaaacgctaaaattcagtgtggccggacccagcaacatggctgtccagggaagaaactacatacctggacccagctaccgacaacaacgtgtctcaaccactgtgactcaaaacaacaacagcgaatttgcttggcctagagcttcttcttgggctctcaatggacgtaatagcttgatgaatcctggacctgctatggccagccacaaagaaggagaggaccgtttctttcctttgtctggatctttaatttttggcaaacaaggaactggaagagacaacgtggatgcggacaaagtcatgataaccaacgaagaagaaattaaaactactaacccggtagcaacggagtcctatggacaagtggccacaaaccaccagagtgcccaagcacaggcgcagaccggctgggttcaaaaccaaggaatacttccgggtatggtttggcaggacagagatgtgtacctgcaaggacccatttgggccaaaattcctcacacggacggcaactttcacccttctccgctgatgggagggtttggaatgaagcacccgcctcctcagatcctcatcaaaaacacacctgtacctgcggatcctccaacggccttcaacaaggacaagctgaactctttcatcacccagtattctactggccaagtcagcgtggagatcgagtgggagctgcagaaggaaaacagcaagcgctggaacccggagatccagtacacttccaactattacaagtctaataatgttgaatttgctgttaatactgaaggtgtatatagtgaaccccgccccattggcaccagatacctgactcgtaatctgtaattgcttgttaatcaataaaccgtttaattcgtttcagttgaactgcggcc

SEQ ID NO: 593 - DNA, 2601 bp, Artificial Sequence
  source: /note="Description of Artificial Sequence: Synthetic polynucleotide"
ccatcgacgtcagacgcggaagcttcgatcaactacgcggacaggtaccaaaacaaatgttctcgtcacgtgggcatgaatctgatgctgtttccctgcagacaatgcgagagactgaatcagaattcaaatatctgcttcactcacggtgtcaaagactgtttagagtgctttcccgtgtcagaatctcaacccgtttctgtcgtcaaaaaggcgtatcagaaactgtgctacattcatcacatcatgggaaaggtgccagacgcttgcactgcttgcgacctggtcaatgtggacttggatgactgtgtttctgaacaataaatgacttaaaccaggtatggctgccgatggttatcttccagattggctcgaggacaaccttagtgaaggaattcgcgagtggtgggctttgaaacctggagcccctcaacccaaggcaaatcaacaacatcaagacaacgctcgaggtcttgtgcttccgggttacaaataccttggacccggcaacggactcgacaagggggagccggtcaacgcagcagacgcggcggccctcgagcacgacaaggcctacgaccagcagctcaaggccggagacaacccgtacctcaagtacaaccacgccgacgccgagttccaggagcggctcaaagaagatacgtcttttgggggcaacctcgggcgagcagtcttccaggccaaaaagaggcttcttgaacctcttggtctggttgaggaagcggctaagacggctcctggaaagaagaggcctgtagagcagtctcctcaggaaccggactcctccgcgggtattggcaaatcgggtgcacagcccgctaaaaagagactcaatttcggtcagactggcgacacagagtcagtcccagaccctcaaccaatcggagaacctcccgcagccccctcaggtgtgggatctcttacaatggcttcaggtggtggcgcaccagtggcagacaataacgaaggtgccgatggagtgggtagttcctcgggaaattggcattgcgattcccaatggctgggggacagagtcatcaccaccagcacccgaacctgggccctgcccacctacaacaatcacctctacaagcaaatctccaacagcacatctggaggatcttcaaatgacaacgcctacttcggctacagcaccccctgggggtattttgacttcaacagattccactgccacttctcaccacgtgactggcagcgactcatcaacaacaactggggattccggcctaagcgactcaacttcaagctcttcaacattcaggtcaaagaggttacggacaacaatggagtcaagaccatcgccaataaccttaccagcacggtccaggtcttcacggactcagactatcagctcccgtacgtgctcgggtcggctcacgagggctgcctcccgccgttcccagcggacgttttcatgattcctcagtacgggtatctgacgcttaatgatggaagccaggccgtgggtcgttcgtccttttactgcctggaatatttcccgtcgcaaatgctaagaacgggtaacaacttccagttcagctacgagtttgagaacgtacctttccatagcagctacgctcacagccaaagcctggaccgactaatgaatccactcatcgaccaatacttgtactatctctcaaagactattaacggttctggacagaatcaacaaacgctaaaattcagtgtggccggacccagcaacatggctgtccagggaagaaactacatacctggacccagctaccgacaacaacgtgtctcaaccactgtgactcaaaacaacaacagcgaatttgcttggcctagagcttcttcttgggctctcaatggacgtaatagcttgatgaatcctggacctgctatggccagccacaaagaaggagaggaccgtttctttcctttgtctggatctttaatttttggcaaacaaggaactggaagagacaacgtggatgcggacaaagtcatgataaccaacgaagaagaaattaaaactactaacccggtagcaacggagtcctatggacaagtggccacaaaccaccagagtgcccaagcacaggcgcagaccggctgggttcaaaaccaaggaatacttccgggtatggtttggcaggacagagatgtgtacctgcaaggacccatttgggccaaaattcctcacacggacggcaactttcacccttctccgctgatgggagggtttggaatgaagcacccgcctcctcagatcctcatcaaaaacacacctgtacctgcggatcctccaacggccttcaacaaggacaagctgaactctttcatcacccagtattctactggccaagtcagcgtggagatcgagtgggagcggcagaaggaaaacagcaagcgctggaacccggagatccagtacacttccaactattacaagtctaataatgttgaatttgctgttaatactgaaggtgtatatagtgaaccccgccccattggcaccagatacctgactcgtaatctgtaattgcttgttaatcaataaaccgtttaattcgtttcagttgaactgcggcc

SEQ ID NO: 594 - DNA, 2601 bp, Artificial Sequence
  source: /note="Description of Artificial Sequence: Synthetic polynucleotide"
ccatcgacgtcagacgcggaagcttcgatcaactacgcggacaggtaccaaaacaaatgttctcgtcacgtgggcatgaatctgatgctgtttccctgcagacaatgcgagagactgaatcagaattcaaatatctgcttcactcacggtgtcaaagactgtttagagtgctttcccgtgtcagaatctcaacccgtttctgtcgtcaaaaaggcgtatcagaaactgtgctacattcatcacatcatgggaaaggtgccagacgcttgcactgcttgcgacctggtcaatgtggacttggatgactgtgtttctgaacaataaatgacttaaaccaggtatggctgccgatggttatcttccagattggctcgaggacaaccttagtgaaggaattcgcgagtggtgggctttgaaacctggagcccctcaacccaaggcaaatcaacaacatcaagacaacgctcgaggtcttgtgcttccgggttacaaataccttggacccggcaacggactcgacaagggggagccggtcaacgcagcagacgcggcggccctcgagcacgacaaggcctacgaccagcagctcaaggccggagacaacccgtacctcaagtacaaccacgccgacgccgagttccaggagcggctcaaagaagatacgtcttttgggggcaacctcgggcgagcagtcttccaggccaaaaagaggcttcttgaacctcttggtctggttgaggaagcggctaagacggctcctggaaagaagaggcctgtagagcagtctcctcaggaaccggactcctccgcgggtattggcaaatcgggtgcacagcccgctaaaaagagactcaatttcggtcagactggcgacacagagtcagtcccagaccctcaaccaatcggagaacctcccgcagccccctcaggtgtgggatctcttacaatggcttcaggtggtggcgcaccagtggcagacaataacgaaggtgccgatggagtgggtagttcctcgggaaattggcattgcgattcccaatggctgggggacagagtcatcaccaccagcacccgaacctgggccctgcccacctacaacaatcacctctacaagcaaatctccaacagcacatctggaggatcttcaaatgacaacgcctacttcggctacagcaccccctgggggtattttgacttcaacagattccactgccacttctcaccacgtgactggcagcgactcatcaacaacaactggggattccggcctaagcgactcaacttcaagctcttcaacattcaggtcaaagaggttacggacaacaatggagtcaagaccatcgccaataaccttaccagcacggtccaggtcttcgcggactcagactatcagctcccgtacgtgctcgggtcggctcacgagggctgcctcccgccgttcccagcggacgttttcatgattcctcagtacgggtatctgacgcttaatgatggaagccaggccgtgggtcgttcgtccttttactgcctggaatatttcccgtcgcaaatgctaagaacgggtaacaacttccagttcagctacgagtttgagaacgtacctttccatagcagctacgctcacagccaaagcctggaccgactaatgaatccactcatcgaccaatacttgtactatctctcaaagactattaacggttctggacagaatcaacaaacgctaaaattcagtgtggccggacccagcaacatggctgtccagggaagaaactacatacctggacccagctaccgacaacaacgtgtctcaaccactgtgactcaaaacaacaacagcgaatttgcttggcctagagcttcttcttgggctctcaatggacgtaatagcttgatgaatcctggacctgctatggccagccacaaagaaggagaggaccgtttctttcctttgtctggatctttaatttttggcaaacaaggaactggaagagacaacgtggatgcggacaaagtcatgataaccaacgaagaagaaattaaaactactaacccggtagcaacggagtcctatggacaagtggccacaaaccaccagagtgcccaagcacaggcgcagaccggctgggttcaaaaccaaggaatacttccgggtatggtttggcaggacagagatgtgtacctgcaaggacccatttgggccaaaattcctcacacggacggcaactttcacccttctccgctgatgggagggtttggaatgaagcacccgcctcctcagatcctcatcaaaaacacacctgtacctgcggatcctccaacggccttcaacaaggacaagctgaactctttcatcacccagtattctactggccaagtcagcgtggagatcgagtgggagctgcagaaggaaaacagcaagcgctggaacccggagatccagtacacttccaactattacaagtctaataatgttgaatttgctgttaatactgaaggtgtatatagtgaaccccgccccattggcaccagatacctgactcgtaatctgtaattgcttgttaatcaataaaccgtttaattcgtttcagttgaactgcggcc

SEQ ID NO: 595 - DNA, 2601 bp, Artificial Sequence
  source: /note="Description of Artificial Sequence: Synthetic polynucleotide"
ccatcgacgtcagacgcggaagcttcgatcaactacgcggacaggtaccaaaacaaatgttctcgtcacgtgggcatgaatctgatgctgtttccctgcagacaatgcgagagactgaatcagaattcaaatatctgcttcactcacggtgtcaaagactgtttagagtgctttcccgtgtcagaatctcaacccgtttctgtcgtcaaaaaggcgtatcagaaactgtgctacattcatcacatcatgggaaaggtgccagacgcttgcactgcttgcgacctggtcaatgtggacttggatgactgtgtttctgaacaataaatgacttaaaccaggtatggctgccgatggttatcttccagattggctcgaggacaaccttagtgaaggaattcgcgagtggtgggctttgaaacctggagcccctcaacccaaggcaaatcaacaacatcaagacaacgctcgaggtcttgtgcttccgggttacaaataccttggacccggcaacggactcgacaagggggagccggtcaacgcagcagacgcggcggccctcgagcacgacaaggcctacgaccagcagctcaaggccggagacaacccgtacctcaagtacaaccacgccgacgccgagttccaggagcggctcaaagaagatacgtcttttgggggcaacctcgggcgagcagtcttccaggccaaaaagaggcttcttgaacctcttggtctggttgaggaagcggctaagacggctcctggaaagaagaggcctgtagagcagtctcctcaggaaccggactcctccgcgggtattggcaaatcgggtgcacagcccgctaaaaagagactcaatttcggtcagactggcgacacagagtcagtcccagaccctcaaccaatcggagaacctcccgcagccccctcaggtgtgggatctcttacaatggcttcaggtggtggcgcaccagtggcagacaataacgaaggtgccgatggagtgggtagttcctcgggaaattggcattgcgattcccaatggctgggggacagagtcatcaccaccagcacccgaacctgggccctgcccacctacaacaatcacctctacaagcaaatctccaacagcacatctggaggatcttcaaatgacaacgcctacttcggctacagcaccccctgggggtattttgacttcaacagattccactgccacttctcaccacgtgactggcagcgactcatcaacaacaactggggattccggcctaagcgactcaacttcaagctcttcaacattcaggtcaaagaggttacggacaacaatggagtcaagaccatcgccaataaccttaccagcacggtccaggtcttcacggactcagactatcagctcccgtacgtgctcgggtcggctcacgagggctgcctcccgccgttcccagcggacgttttcatgattcctcagtacgggtatctgacgcttaatgatggaagccaggccgtgggtcgttcgtccttttactgcctggaatatttcccgtcgcaaatgctaagaacgggtaacaacttccagttcagctacgagtttgagaacgtacctttccatagcagctacgctcacagccaaagcctggaccgactaatgaatccactcatcgaccaatacttgtactatctctcaaagactattaacggttctggacagaatcaacaaacgctaaaattcagtgtggccggacccagcaacatggctgtccagggaagaaactacatacctggacccagctaccgacaacaacgtgtctcaaccactgtgactcaaaacaacaacagcgaaattgcttggcctagagcttcttcttgggctctcaatggacgtaatagcttgatgaatcctggacctgctatggccagccacaaagaaggagaggaccgtttctttcctttgtctggatctttaatttttggcaaacaaggaactggaagagacaacgtggatgcggacaaagtcatgataaccaacgaagaagaaattaaaactactaacccagtagcaacggagtcctatggacaagtggccacaaaccaccagagtgcccaagcacaggcgcagaccggctgggttcaaaaccaaggaatacttccgggtatggtttggcaggacagagatgtgtacctgcaaggacccatttgggccaaaattcctcacacggacggcaactttcacccttctccgctgatgggagggtttggaatgaagcacccgcctcctcagatcctcatcaaaaacacacctgtacctgcggatcctccaacggccttcaacaaggacaagctgaactctttcatcacccagtattctactggccaagtcagcgtggagatcgagtgggagctgcagaaggaaaacagcaagcgctggaacccggagatccagtacacttccaactattgcaagtctaataatgttgaatttgctgttaatactgaaggtgtatatagtgaaccccgccccattggcaccagatacctgactcgtaatctgtaattgcttgttaatcaataaaccgtttaattcgtttcagttgaactgcggcc

SEQ ID NO: 596 - DNA, 2601 bp, Artificial Sequence
  source: /note="Description of Artificial Sequence: Synthetic polynucleotide"
ccatcgacgtcagacgcggaagcttcgatcaactacgcggacaggtaccaaaacaaatgttctcgtcacgtgggcatgaatctgatgctgtttccctgcagacaatgcgagagactgaatcagaattcaaatatctgcttcactcacggtgtcaaagactgtttagagtgctttcccgtgtcagaatctcaacccgtttctgtcgtcaaaaaggcgtatcagaaactgtgctacattcatcacatcatgggaaaggtgccagacgcttgcactgcttgcgacctggtcaatgtggacttggatgtctgtgtttctgaacaataaatgacttaaaccaggtatggctgccgatggttatcttccagattggctcgaggacaaccttagtgaaggaattcgcgagtggtgggctttgaaacctggagcccctcaacccaaggcaaatcaacaacatcaagacaacgctcgaggtcttgtgcttccgggttacaaataccttggacccggcaacggactcgataagggggagccggtcaacgcagcagacgcggcggccctcgagcacgacaaggcctacgaccagcagctcaaggccggagacaacccgtacctcaagtacaaccacgccgacgccgagttccaggagcggctcaaagaagatacgtcttttgggggcaacctcgggcgagcagtcttccaggccaaaaagaggcttcttgaacctcttggtctggttgaggaagcggctaagacggctcctggaaagaagaggcctgtagagcagtctcctcaggaaccggactcctccgcgggtattggcaaatcgggtgcacagcccgctaaaaagagactcaatttcggtcagactggcgacacagagtcagtcccagaccctcaaccaatcggagaacctcccgcagccccctcaggtgtgggatctcttacaatggcttcaggtggtggcgcaccagtggcagacaataacgaaggtgccgatggagtgggtagttcctcgggaaattggcattgcgattcccaatggctgggggacagagtcatcaccaccagcacccgaacctgggccctgcccacctacaacaatcacctctacaagcaaatctccaacagcacatctggaggatcttcaaatgacaacgcctacttcggctacagcaccccctgggggtattttgacttcaacagattccactgccacttctcaccacgtgactggcagcgactcatcaacaacaactggggattccggcctaagcgactcaacttcaagctcttcaacattcaggtcaaagaggttacggacaacaatggagtcaagaccatcgccaataaccttaccagcacggtccaggtcttcacggactcagactatcagctcccgtacgtgctcgggtcggctcacgagggctgcctcccgccgttcccagcggacgttttcatgattcctcagtacgggtatctgacgcttaatgatggaagccaggccgtgggtcgttcgtccttttactgcctggaatatttcccgtcgcaaatgctaagaacgggtaacaacttccagttcagctacgagtttgagaacgtacctttccatagcagctacgctcacagccaaagcctggaccgactaatgaatccactcatcgaccaatacttgtactatctctcaaagactattaacggttctggacagaatcaacaaacgctaaaattcagtgtggccggacccagcaacatggctgtccagggaagaaactacatacctggacccagctaccgacaacaacgtgtctcaaccactgtgactcaaaacaacaacagcgaatttgcttggcctagagcttcttcttgggctctcaatggacgtaatagcttgatgaatcctggacctgctatggccagccacaaagaaggagaggaccgtttctttcctttgtctggatctttaatttttggcaaacaaggaactggaagagacaacgtggatgcggacaaagtcatgataaccaacgaagaagaaattaaaactactaacccggtagcaacggagtcctatggacaagtggccacaaaccaccagagtgcccaagcacaggcgcagaccggctgggttcaaaaccaaggaatacttccgggtatggtttggcaggacagagatgtgtacctgcaaggacccatttgggccaaaattcctcacacggacggcaactttcacccttctccgctgatgggagggtttggaatgaagcacccgcctcctcagatcctcatcaaaaacacacctgtacctgcggatcctccaacggccttcaacaaggacaagctgaactctttcatcacccagtattctactggccaagtcagcgtggagatcgagtgggagctgcagaaggaaaacagcaagcgctggaacccggagatccagtacacttccaactattacaagtctaataatgttgaatttgctgttaatactgaaggtgtatatagtgaaccccgccccattggcaccagatacctgactcgtaatctgtaattgcttgttaatcaataaaccgtttaattcgtttcagttgaactgcggcc

SEQ ID NO: 597 - protein, 736 aa, Artificial Sequence
  source: /note="Description of Artificial Sequence: Synthetic polypeptide"
MTADGYLPDWLEDNLSEGIREWWALKPGAPQPKANQQHQDNARGLVLPGYKYLGPGNGLDKGEPVNAADAAALEHDKAYDQQLKAGDNPYLKYNHADAEFQERLKEDTSFGGNLGRAVFQAKKRLLEPLGLVEEAAKTAPGKKRPVEQSPQEPDSSAGIGKSGAQPAKKRLNFGQTGDTESVPDPQPIGEPPAAPSGVGSLTMASGGGAPVADNNEGADGVGSSSGNWHCDSQWLGDRVITTSTRTWALPTYNNHLYKQISNSTSGGSSNDNAYFGYSTPWGYFDFNRFHCHFSPRDWQRLINNNWGFRPKQLNFKLFNIQVKEVTDNNGVKTIANNLTSTVQVFTDSDYQLPYVLGSAHEGCLPPFPADVFMIPQYGYLTLNDGSQAVGRSSFYCLEYFPSQMLRTGNNFQFSYEFENVPFHSSYAHSQSLDRLMNPLIDQYLYYLSKTINGSGQNQQTLKFSVAGPSNMAVQGRNYIPGPSYRQQRVSTTVTQNNNSEFAWPGASSWALNGRNSLMNPGPAMASHKEGEDRFFPLSGSLIFGKQGTGRDNVDADKVMITNEEEIKTTNPVATESYGQVATNHQSAQAQAQTGWVQNQGILPGMVWQDRDVYLQGPIWAKIPHTDGNFHPSPLMGGFGMKHPPPQILIKNTPVPADPPTAFNKDKLNSFITQYSTGQVSVEIEWELQKENSKRWNPEIQYTSNYYKSNNVEFAVNTEGVYSEPRPIGTRYLTRNL

SEQ ID NO: 598 - protein, 736 aa, Artificial Sequence
  source: /note="Description of Artificial Sequence: Synthetic polypeptide"
MAADGYLPDWLEDNLSEGIREWWALKPGAPQPKANQQHQDNARGLVLPGYKYLGPGNGLDKGEPVNAADAAALEHDKAYDQQLKAGDNPYLKYNHADAEFQERLKEDTSFGGNLGRAVFQAKKRLLEPLGLVEEAAKTAPGKKRPVEQSPQEPDSSAGIGKSGAQPAKKRLNFGQTGDTESVPDPQPIGEPPAAPSGVGSLTMASGGGAPVADNNEGADGVGSSSGNWHCDSQWLGDRVITTSTRTWALPTYNNHLYKQISNSTSGGSSNDNAYFGYSTPWGYFDFNRFHCHFSPRDWQRLINNNWGFRPKRLNFKLFNIQVKEVTDNNGVKTIANNLTSTVQVFTDSDYQLPYVLGSAHEGCLPPFPADVFMIPQYGYLTLNDGSQAVGRSSFYCLEYFPSQMLRTGNNFQFSYEFENVPFHSSYAHSQSLDRLMNPLIDQYLYYLSKTINGSGQNQQTLKFSVAGPSNMAVQGRNYIPGPSYRQQRVSTTVTQNNNSEFAWPGASSWALNGRNSLMNPGPAMASHKEGEDRFFPLSGSLIFGKQGTGRDNVDADKVMITNEEEIKTTNPVATESYGQVATNHQSAQAQAQTGWVQNQGILPGMVWQDRDVYLQGPIWAKIPHTGGNFHPSPLMGGFGMKHPPPQILIKNTPVPADPPTAFNKDKLNSFITQYSTGQVSVEIEWELQKENSKRWNPEIQYTSNYYKSNNVEFAVNTGGVYSEPRPIGTRYLTRNL

SEQ ID NO: 599 - protein, 736 aa, Artificial Sequence
  source: /note="Description of Artificial Sequence: Synthetic polypeptide"
MAADGYLPDWLEDNLSEGIREWWALKPGAPQPKANQQHQDNARGLVLPGYKYLGPGNGLDKGEPVNAADAAALEHDKAYDQQLKAGDNPYLKYNHADAEFQERLKEDTSFGGNLGRAVFQAKKRLLEPLGLVEEAAKTAPGKKRPVEQSPQEPDSSAGIDKSGAQPAKKRLNFGQTGDTESVPDPQPIGEPPAAPSGVGSLTMASGGGAPVADNNEGADGVGSSSGNWHCDSQWLGDRVITTSTRTWALPTYNNHLYKQISNSTSGGSSNDNAYFGYSTPWGYFDFNRFHCHFSPRDWQRLINNNWGFRPKRLNFKLFNIQVKEVTDNNGVKTIANNLTSTVQVFTDSDYQLPYVLGSAHEGCLPPFPADVFMIPQYGYLTLNDGSQAVGRSSFYCLEYFPSQMLRTGNNFQFSYEFENVPFHSSYAHSQSLDRLMNPLIDQYLYYLSKTINGSGQNQQTLKFSVAGPSNMAVQGRNYIPGPSYRQQRVSTTVTQNNNSEFAWPGASSWALNGRNSLMNPGPAMASHKEGEDRFFPLSGSLIFGKQGTGRDNVDADKVMITNEEEIKTTNPVATESYGQVATNHQSAQAQAQTGWVQNQGILPGMVWQDRDVYLQGPIWAKIPHTDGNFHPSPLMGGFGMKHPPPQILIKNTPVPADPPTAFNKDKLNSFITQYSTGQVSVEIEWELQKENSKRWNPEIQYTSNYYKSNNVEFAVNTEGVYSEPRPIGTRYLTRNL

SEQ ID NO: 600 - protein, 736 aa, Artificial Sequence
  source: /note="Description of Artificial Sequence: Synthetic polypeptide"
MAADGYLPDWLEDNLSEGIREWWALKPGAPQPKANQQHQDNARGLVLPGYKYLGPGNGLDKGEPVNAADAAALEHDKAYDQQLKAGDNPYLKYNHADAEFQERLKEDTSFGGNLGRAVLQAKKRLLEPLGLVEEAAKTAPGKKRPVEQSPQEPDSSAGIGKSGAQPAKKRLNFGQTGDTESVPDPQPIGEPPAAPSGVGSLTMASGGGAPVADNNEGADGVGSSSGNWHCDSQWLGDRVITTSTRTWALPTYNNHLYKQISNSTSGGSSNDNAYFGYSTPWGYFDFNRFHCHFSPRDWQRLINNNWGFRPKRLNFKLFNIQVKEVTDNNGVKTIANNLTSTVQVFTDSDYQLPYVLGSAHEGCLPPFPADVFMIPQYGYLTLNDGSQAVGRSSFYCLEYFPSQMLRTGNNFQFSYEFENVPFHSSYAHSQSLDRLMNPLIDQYLYYLSKTINGSGQNQQTLKFSVAGSSNMAVQGRNYIPGPSYRQQRVSTTVTQNNNSEFAWPGASSWALNGRNSLMNPGPAMASHKEGEDRFFPLSGSLIFGKQGTGRDNVDADKVMITNEEEIKTTNPVATESYGQVATNHQSAQAQAQTGWVQNQGILPGMVWQDRDVYLQGPIWAKIPHTDGNFHPSPLMGGFGMKHPPPQILIKNTPVPADPPTAFNKDKLNSFITQYSTGQVSVEIEWELQKENSKRWNPEIQYTSNYYKSNNVEFAVNTEGVYSEPRPIGTRYLTRNL

SEQ ID NO: 601 - protein, 736 aa, Artificial Sequence
  source: /note="Description of Artificial Sequence: Synthetic polypeptide"
MAADGYLPDWLEDNLSEGIREWWALKPGAPQPKANQQHQDNARGLVLPGYKYLGPGNGLDKGEPVNAADAAALEHDRAYDQQLKAGDNPYLKYNHADAEFQERLKEDTSFGGNLGRAVFQAKKRLLEPLGLVEEAAKTAPGKKRPVEQSPQEPDSSAGIGKSGAQPAKKRLNFGQTGDTESVPDPQPIGEPPAAPSGVGSLTMASGGGAPVADNNEGADGVGSSSGNWHCDSQWLGDRVITTSTRTWALPTYNNHLYKQISNSTSGGSSNDNAYFGYSTPWGYFDFNRFHCHFSPRDWQRLINNNWGFRPKRLNFKLFNIQVKEVTDNNGVKTIANNLTSTVQVFTDSDYQLPYVLGSAHEGCLPPFPADVFMIPQYGYLTLNDGSQAVGRSSFYCLEYFPSQMLRTGNNFQFSYEFENVPFHSSYAHSQSLDRLMNPLIDQYLYYLSKTINGSGQNQQTLKFSVAGPSNMAVQGRNYIPGPSYRQQRVSTTVTQNNNSEFAWPGASSWALNGRNSLMNPGPAMASHKEGEDRFFPLSGSLIFGKQGTGRDNVDADKVMITNEEEIKTTNPVATESYGQVATNHQSAQAQAQTGWVQNQGILPGMVWQDRDVYLQGPIWAKIPHTDGNFHPSPLMGGFGMKHPPPQILIKNTPVPADPPTAFNKDKLNSFITQYSTGQVSVEIEWELQKKNSKRWNPEIQYTSNYYKSNNVEFAVNTEGVYSEPRPIGTRYLTRNL

SEQ ID NO: 602 - protein, 736 aa, Artificial Sequence
  source: /note="Description of Artificial Sequence: Synthetic polypeptide"
MAADGYLPDWLEDNLSEGIREWWALKPGAPQPKANQQHQDNARGLVLPGYKYLGPGNGLDKGEPVNAADAAALEHDKAYDQQLKAGDNPYLKYNHADAEFQERLKEDTSFGGNLGRAVFQAKKRLLEPLGLVEEAAKTAPGKKRPVEQSPQEPDSSAGIGKSGAQPAKKRLNFGQTGDTESVPDPQPIGEPPAAPSGVGSLTMASGGGAPVADNNEGADGVGSSSGNWHCDSQWLGDRVITTSTRTWALPTYNNHLYKQISNSTSGGSSNDNAYFGYSTPWGYFDFNRFHCHFSPRDWQRLINNNWGFRPKRLNFKLFNIQVKEVTDNNGVKTIANNLTSTVQVFTDSDYQLPYVLGSAHEGCLPPFPADVFMIPQYGYLTLNDGSQAVGRSSFYCLEYFPSQMLRTGNNFQFSYEFENVPFHSSYAHSQSLDRLMNPLIDQYLYYLSKTINGSGQNQQTLKFSVAGPSNMAVQGRNYIPGPSYRQQRVSTTVTQNNNSEFAWPGASSWALNGRNSLMNPGPAMASHKEGEDRFFPLSGSLIFGKQGTGRDNVDADKVMITNEEEIKTTNPVATESYGQVATNHQSAQARAQTGWVQNQGILPGMVWQDRDVYLQGPIWAKIPHTDGNFHPSPLMGGFGMKHPPPQILIKNTPVPADPPTAFNKDKLNSFITQYSTGQVSVEIEWELQKENSKRWNPEIQYTSNYYKSNNVEFAVNTEGVYSEPRPIGTRYLTRNL

SEQ ID NO: 603 - protein, 736 aa, Artificial Sequence
  source: /note="Description of Artificial Sequence: Synthetic polypeptide"
MAADGYLPDWLEDNLSEGIREWWALKPGAPQPKANQQHQDNARGLVLPGYKYLGPGNGLDKGEPVNAVDAAALEHDKAYDQQLKAGDNPYLKYNHADAEFQERLKEDTSFGGNLGRAVFQAKKRLLEPLGLVEEAAKTAPGKKRPVEQSPQEPDSSAGIGKSGAQPAKKRLNFGQTGDTESVPDPQPIGEPPAAPSGVGSLTMASGGGAPVADNNEGADGVGSSSGNWHCDSQWLGDRVITTSTRTWALPTYNNHLYKQISNSTSGGSSNDNAYFGYSTPWGYFDFNRFHCHFSPRDWQRLINNNWGFRPKRLNFKLFNIQVKEVTDNNGVKTIANNLTSTVQVFTDSDYQLPYVLGSAHEGCLPPFPADVFMIPQYGYLTLNDGSQAVGRSSFYCLEYFPSQMLRTGNNFQFSYEFENVPFHSSYAHSQSLDRLMNPLIDQYLYYLSKTINGSGQNQQTLKFSVAGPSNMAVQGRNYIPGPSYRQQRVSTTVTQNNNSEFAWPGASSWALNGRNSLMNPGPAMASHKEGEDRFFPLSGSLIFGKQGTGRDNVDADKVMITNEEEIKTTNPVATESYGQVATNHQSAQAQAQTGWVQNQGILPGMVWQDRDVYLQGPIWAKIPHTDGNFHPSPLMGGFGMKHPPPQILIKNTPVPADPPTAFNKDKLNSFITQYSTGQVSVEIEWELQKENSKRWNPEIQYTSNYYKSNNVEFAVNTEGVYSEPRPIGTRYLTRNL

SEQ ID NO: 604 - protein, 736 aa, Artificial Sequence
  source: /note="Description of Artificial Sequence: Synthetic polypeptide"
MAADGYLPDWLEDNLSEGIREWWALKPGAPQPKANQQHQDNARGLVLPGYKYLGPGNGLDKGEPVNAADAAALEHDKAYDQQLKAGDNPYLKYNHADAEFQERLKEDTSFGGNLGRAVFQAKKRLLEPLGLVEEAAKTAPGKKRPVEQSPREPDSSAGIGKSGAQPAKKRLNFGQTGDTESVPDPQPIGEPPAAPSGVGSLTMASGGGAPVADNNEGADGVGSSSGNWHCDSQWLGDRVITTSTRTWALPTYNNHLYKQISNSTSGGSSNDNAYFGYSTPWGYFDFNRFHCHFSPRDWQRLINNNWGFRPKRLNFKLFNIQVKEVTDNNGVKTIANNLTSTVQVFTDSDYQLPYVLGSAHEGCLPPFPADVFMIPQYGYLTLNDGSQAVGRSSFYCLEYFPSQMLRTGNNFQFSYEFENVPFHSSYAHSQSLDRLMNPLIDQYLYYLSKTINGSGQNQQTLKFSVAGPSNMAVQGRNYIPGPSYRQQRVSTTVTQNNNSEFAWPGASSWALNGRNSLMNPGPAMASHKEGEDRFFPLSGSLIFGKQGTGRDNVDADKVMITNEEEIKTTNPVATESYGQVATNHQSAQAQAQTGWVQNQGILPGMVWQDRDVYLQGPIWAKIPHTDGNFHPSPLMGGFGMKHPPPQILIKNTPVPADPPTAFNKDKLNSFITQYSTGQVSVEIEWELQKENSKRWNPEIQYTSNYYKSNNVEFAVNTEGVYSEPRPIGTRYLTRNL

SEQ ID NO: 605 - protein, 736 aa, Artificial Sequence
  source: /note="Description of Artificial Sequence: Synthetic polypeptide"
MAADGYLPDWLEDNLSEGIREWWALKPGAPQPKANQQHQDNARGLVLPGYKYLGPGNGLDKGEPVNAADAAALEHDKAYDQQLKAGDNPYLKYNHADAEFQERLKEDTSFGGNLGRAVFQAKKRLLEPLGLVEEAAKTAPGKKRPVEQSPQEPDSSAGIGKSGAQPAKKRLNFGQTGDTESVPDPQPIGEPPAAPSGVGSLTMASCGGAPVADNNEGADGVGSSSGNWHCDSQWLGDRVITTSTRTWALPTYNNHLYKQISNSTSGGSSNDNAYFGYSTPWGYFDFNRFHCHFSPRDWQRLINNNWGFRPKRLNFKLFNIQVKEVTDNNGVKTIANNLTSTVQVFTDSDYQLPYVLGSAHEGCLPPFPADVFMIPQYGYLTLNDGSQAVGRSSFYCLEYFPSQMLRTGNNFQFSYEFENVPFHSSYAHSQSLDRLMNPLIDQYLYYLSKTINGSGQNQQTLKFSVAGPSNMAVQGRNYIPGPSYRQQRVSTTVTQNNNSEFAWPGASSWALNGRNSLMNPGPAMASHKEGEDRFFPLSGSLIFGKQGTGRDNVDADKVMITNEEEIKTTNPVATESYGQVATNHQSAQAQAQTGWVQNQGILPGMVWQDRDVYLQGPIWAKIPHTDGNFHPSPLMGGFGMKHPPPQILIKNTPVPADPPTAFNKDKLNSFITQYSTGQVSVEIEWELQKENSKRWNPEIQYTSNYYKSNNVEFAVNTEGVYSEPRPIGTRYLTRNL

SEQ ID NO: 606 - protein, 736 aa, Artificial Sequence
  source: /note="Description of Artificial Sequence: Synthetic polypeptide"
MAADGYLPDWLEDNLSEGIREWWALKPGAPQPKANQQHQDNARGLVLPGYKYLGPGNGLDKGEPINAADAAALEHDKAYDQQLKAGDNPYLKYNHADAEFQERLKEDTSFGGNLGRAVFQAKKRLLEPLGLVEEAAKTAPGKKRPVEQSPQEPDSSAGIGKSGAQPAKKRLNFGQTGDTESVPDPQPIGEPPAAPSGVGSLTMASGGGAPVADNNEGADGVGSSSGNWHCDSQWLGDRVITTSTRTWALPTYNNHLYKQISNSTSGGSSNDNAYFGYSTPWGYFDFNRFHCHFSPRDWQRLINNNWGFRPKRLNFKLFNIQVKEVTDNNGVKTIANNLTSTVQVFTDSDYQLPYVLGSAHEGCLPPFPADVFMIPQYGYLTLNDGSQAVGRSSFYCLEYFPSQMLRTGNNFQFSYEFENVPFHSSYAHSQSLDRLMNPLIDQYLYYLSKTINGSGQNQQTLKFSVAGPSNMAVQGRNYIPGPSYRQQRVSTTVTQNNNSEFAWPGASSWALNGRNSLMNPGPAMASHKEGEDRFFPLSGSLIFGKQGTGRDNVDADKVMITNEEEIKTTNPVATESYGQVATNHQSAQAQAQTGWVQNQGILPGMVWQDRDVYLQGPIWAKIPHTYGNFHPSPLMGGFGMKHPPPQILIKNTPVPADPPTAFNKDKLNSFITQYSTGQVSVEIEWELQKENSKRWNPEIQYTSNYYKSNNVEFAVNTEGVYSEPRPIGTRYLTRNL

SEQ ID NO: 607 - protein, 736 aa, Artificial Sequence
  source: /note="Description of Artificial Sequence: Synthetic polypeptide"
MAADGYLPDWLEDNLSEGIREWWALKPGAPQPKANQQHQDNARGLVLPGYKYLGPGNGLDKGEPVNAADAAALEHDKAYDQQLKAGDNPYLKYNHADAEFQERLKEDTSFGGNLGRAVFQAKKRLLEPLGLVEEAAKTAPGKKRPVEQSPQEPDSSAGIGKSGAQPAKKRLNFGQTGDTESVPDPQPIGEPPAAPSGVGSLTMASGGGAPVADNNEGADGVGSSSGNWHCDSQWLGDRVITTSTRTWALPTYNNHLYKQISNSTSGGSSNDNAYFGYSTPWGYFDFNRFHCHFSPHDWQRLINNNWGFRPKRLNFKLFNIQVKEVTDNNGVKTIANNLTSTVQVFTDSDYQLPYVLGSAHEGCLPPFPADVFMIPQYGYLTLNDGSQAVGRSSFYCLEYFPSQMLRTGNNFQFSYEFENVPFHSSYAHSQSLDRLMNPLIDQYLYYLSKTINGSGQNQQTLKFNVAGPSNMAVQGRNYIPGPSYRQQRVSTTVTQNNNSEFAWPRASSWALNGRNSLMNPGPAMASHKEGEDRFFPLSGSLIFGKQGTGRDNVDADKVMITNEEEIKTTNPVATESYGQVATNHQSAQAQAQTGWVQNQGILPGMVWQDRDVYLQGPIWAKIPHTDGNFHPSPLMGGFGMKHPPPQILIKNTPVPADPPTAFNKDKLNSFITQYSTGQVSMEIEWELQKENSKRWNPEIQYTSNYYKSNNVEFAVNTEGVYSEPRPIGTRYLTRNL

SEQ ID NO: 608 - protein, 736 aa, Artificial Sequence
  source: /note="Description of Artificial Sequence: Synthetic polypeptide"
MAADGYLPDWLEDNLSEGIREWWALKPGAPQPKANQQHQDNARGLVLPGYKYLGPGNGLDKGEPVNAADAAALEHDKAYDQQLKAGDNPYLKYNHADAEFQERLKEDTSFGGNLGRAVFQAKKRLLEPLGLVEEAAKTAPGKKRPVEQSPQEPDSSAGIGKSGAQPAKKRLNFGQTGDTESVPDPQPIGEPPAAPSGVGSLTMASGGGAPVADNNEGADGVGSSSGNWHCDSQWLGDRVITTSTRTWALPTYNNHLYKQISNSTSGGSSNDNAYFGYSTPWGYFDFNRFHCHFSPRDWQRLINNNWGFRPKRLNFKLFNIQVKEVTDNNGVKTIANNLTSTVQVFTDSDYQLPYVLGSAHEGCLPPFPADVFMIPQYGYLTLNDGSQAVGRSSFYCLEYFPSQMLRTGNNFQFSYEFENVPFHSSYAHSQSLDRLMNPLIDQYLYYLSKTINGSGQNQQTLKFSVAGPSNMAVQGRNYIPGPSYRQQRVSTTVTQNNNSEFAWPRASSWALNGRNSLMNPGPAMASHKEGEDRFFPLSGSLIFGKQGTGRDNVDADKVMITNEEEIKTTNPVATESYGQVATNHQSAQAQAQTGWVQNQGILPGMVWQDRDVYLQGPIWAKIPHTDGNFHPSPLMGGFGMKHPPPQILIKNTPVPADPPTAFNKDKLNSFITQYSTGQVSVEIEWELQKENSKRWNPEIQYTSNYYKSNNVEFAVNTEGVYSEPRPIGTRYLTRNL

SEQ ID NO: 609 - protein, 736 aa, Artificial Sequence
  source: /note="Description of Artificial Sequence: Synthetic polypeptide"
MAADGYLPDWLEDNLSEGIREWWALKPGAPQPKANQQHQDNARGLVLPGYKYLGPGNGLDKGEPVNAADAAALEHDKAYDQQLKAGDNPYLKYNHADAEFQERLKEDTSFGGNLGRAVFQAKKRLLEPLGLVEEAAKTAPGKKRPVEQSPQEPDSSAGIGKSGAQPAKKRLNFGQTGDTESVPDPQPIGEPPAAPSGVGSLTMASGGGAPVADNNEGADGVGSSSGNWHCDSQWLGDRVITTSTRTWALPTYNNHLYKQISNSTSGGSSNDNAYFGYSTPWGYFDFNRFHCHFSPRDWQRLINNNWGFRPKRLNFKLFNIQVKEVTDNNGVKTIANNLTSTVQVFTDSDYQLPYVLGSAHEGCLPPFPADVFMIPQYGYLTLNDGSQAVGRSSFYCLEYFPSQMLRTGNNFQFSYEFENVPFHSSYAHSQSLDRLMNPLIDQYLYYLSKTINGSGQNQQTLKFSVAGPSNMAVQGRNYIPGPSYRQQRVSTTVTQNNNSEFAWPRASSWALNGRNSLMNPGPAMASHKEGEDRFFPLSGSLIFGKQGTGRDNVDADKVMITNEEEIKTTNPVATESYGQVATNHQSAQAQAQTGWVQNQGILPGMVWQDRDVYLQGPIWAKIPHTDGNFHPSPLMGGFGMKHPPPQILIKNTPVPADPPTAFNKDKLNSFITQYSTGQVSVEIEWERQKENSKRWNPEIQYTSNYYKSNNVEFAVNTEGVYSEPRPIGTRYLTRNL

SEQ ID NO: 610 - protein, 736 aa, Artificial Sequence
  source: /note="Description of Artificial Sequence: Synthetic polypeptide"
MAADGYLPDWLEDNLSEGIREWWALKPGAPQPKANQQHQDNARGLVLPGYKYLGPGNGLDKGEPVNAADAAALEHDKAYDQQLKAGDNPYLKYNHADAEFQERLKEDTSFGGNLGRAVFQAKKRLLEPLGLVEEAAKTAPGKKRPVEQSPQEPDSSAGIGKSGAQPAKKRLNFGQTGDTESVPDPQPIGEPPAAPSGVGSLTMASGGGAPVADNNEGADGVGSSSGNWHCDSQWLGDRVITTSTRTWALPTYNNHLYKQISNSTSGGSSNDNAYFGYSTPWGYFDFNRFHCHFSPRDWQRLINNNWGFRPKRLNFKLFNIQVKEVTDNNGVKTIANNLTSTVQVFADSDYQLPYVLGSAHEGCLPPFPADVFMIPQYGYLTLNDGSQAVGRSSFYCLEYFPSQMLRTGNNFQFSYEFENVPFHSSYAHSQSLDRLMNPLIDQYLYYLSKTINGSGQNQQTLKFSVAGPSNMAVQGRNYIPGPSYRQQRVSTTVTQNNNSEFAWPRASSWALNGRNSLMNPGPAMASHKEGEDRFFPLSGSLIFGKQGTGRDNVDADKVMITNEEEIKTTNPVATESYGQVATNHQSAQAQAQTGWVQNQGILPGMVWQDRDVYLQGPIWAKIPHTDGNFHPSPLMGGFGMKHPPPQILIKNTPVPADPPTAFNKDKLNSFITQYSTGQVSVEIEWELQKENSKRWNPEIQYTSNYYKSNNVEFAVNTEGVYSEPRPIGTRYLTRNL

SEQ ID NO: 611 - protein, 736 aa, Artificial Sequence
  source: /note="Description of Artificial Sequence: Synthetic polypeptide"
MAADGYLPDWLEDNLSEGIREWWALKPGAPQPKANQQHQDNARGLVLPGYKYLGPGNGLDKGEPVNAADAAALEHDKAYDQQLKAGDNPYLKYNHADAEFQERLKEDTSFGGNLGRAVFQAKKRLLEPLGLVEEAAKTAPGKKRPVEQSPQEPDSSAGIGKSGAQPAKKRLNFGQTGDTESVPDPQPIGEPPAAPSGVGSLTMASGGGAPVADNNEGADGVGSSSGNWHCDSQWLGDRVITTSTRTWALPTYNNHLYKQISNSTSGGSSNDNAYFGYSTPWGYFDFNRFHCHFSPRDWQRLINNNWGFRPKRLNFKLFNIQVKEVTDNNGVKTIANNLTSTVQVFTDSDYQLPYVLGSAHEGCLPPFPADVFMIPQYGYLTLNDGSQAVGRSSFYCLEYFPSQMLRTGNNFQFSYEFENVPFHSSYAHSQSLDRLMNPLIDQYLYYLSKTINGSGQNQQTLKFSVAGPSNMAVQGRNYIPGPSYRQQRVSTTVTQNNNSEIAWPRASSWALNGRNSLMNPGPAMASHKEGEDRFFPLSGSLIFGKQGTGRDNVDADKVMITNEEEIKTTNPVATESYGQVATNHQSAQAQAQTGWVQNQGILPGMVWQDRDVYLQGPIWAKIPHTDGNFHPSPLMGGFGMKHPPPQILIKNTPVPADPPTAFNKDKLNSFITQYSTGQVSVEIEWELQKENSKRWNPEIQYTSNYCKSNNVEFAVNTEGVYSEPRPIGTRYLTRNL

SEQ ID NO: 612 - protein, 736 aa, Artificial Sequence; identical to SEQ ID NO: 608
  source: /note="Description of Artificial Sequence: Synthetic polypeptide"

SEQ ID NO: 613 - DNA, 2208 bp, Artificial Sequence
  source: /note="Description of Artificial Sequence: Synthetic polynucleotide"
atggctgccgatggttatcttccagattggctcgaggacaaccttagtgaaggaattcgcgagtggtgggctttgaaacctggagcccctcaacccaaggcaaatcaacaacatcaagacaacgctcgaggtcttgtgcttccgggttacaaataccttggacccggcaacggactcgacaagggggagccggtcaacgcagcagacgcggcggccctcgagcacgacaaggcctacgaccagcagctcaaggccggagacaacccgtacctcaagtacaaccacgccgacgccgagttccaggagcggctcaaagaagatacgtcttttgggggcaacctcgggcgagcagtcttccaggccaaaaagaggcttcttgaacctcttggtctggttgaggaagcggctaagacggctcctggaaagaagaggcctgtagagcagtctcctcaggaaccggactcctccgcgggtattggcaaatcgggtgcacagcccgctaaaaagagactcaatttcggtcagactggcgacacagagtcagtcccagaccctcaaccaatcggagaacctcccgcagccccctcaggtgtgggatctcttacaatggcttcaggtggtggcgcaccagtggcagacaataacgaaggtgccgatggagtgggtagttcctcgggaaattggcattgcgattcccaatggctgggggacagagtcatcaccaccagcacccgaacctgggccctgcccacctacaacaatcacctctacaagcaaatctccaacagcacatctggaggatcttcaaatgacaacgcctacttcggctacagcaccccctgggggtattttgacttcaacagattccactgccacttctcaccacgtgactggcagcgactcatcaacaacaactggggattccggcctaagcgactcaacttcaagctcttcaacattcaggtcaaagaggttacggacaacaatggagtcaagaccatcgccaataaccttaccagcacggtccaggtcttcacggactcagactatcagctcccgtacgtgctcgggtcggctcacgagggctgcctcccgccgttcccagcggacgttttcatgattcctcagtacgggtatctgacgcttaatgatggaagccaggccgtgggtcgttcgtccttttactgcctggaatatttcccgtcgcaaatgctaagaacgggtaacaacttccagttcggctacgagtttgagaacgtacctttccatagcagctacgctcacagccaaagcctggaccgactaatgaatccactcatcgaccaatacttgtactatctctcaaagactattaacggttctggacagaatcaacaaacgctaaaattcagtgtggccggacccagcaacatggctgtccagggaagaaactacatacctggacccagctaccgacaacaacgtgtctcaaccactgtgactcaaaacaacaacagcgaatttgcttggcctggagcttcttcttgggctctcaatggacgtaatagcttgatgaatcctggacctgctatggccagccacaaagaaggagaggaccgtttctttcctttgtctggatctttaatttttggcaaacaaggaactggaagagacaacgtggatgcggacaaagtcatgataaccaacgaagaagaaattaaaactactaacccggtagcaacggagtcctatggacaagtggccacaaaccaccagagtgcccaagcacaggcgcagaccggctgggttcaaaaccaaggaatacttccgggtatggtttggcaggacagagatgtgtacctgcaaggacccatttgggccaaaattcctcacacggacggcaactttcacccttctccgctgatgggagggtttggaatgaagcacccgcctcctcagatcctcatcaaaaacacacctgtacctgcggatcctccaacggccttcaacaaggacaagctgaactctttcatcacccagtattctactggccaagtcagcgtggagatcgagtgggagctgcagaaggaaaacagcaagcgctgggacccggagatccagtacacttccaactattacaagtctaataatgttgaatttgctgttaatactgaaggtgtatatagtgaaccccgccccattggcaccagatacctgactcgtaatctg

SEQ ID NO: 614 - DNA, 2208 bp, Artificial Sequence
  source: /note="Description of Artificial Sequence: Synthetic polynucleotide"
atggctgccgatggttatcttccagattggctcgaggacaaccttagtgaaggaattcgcgagtggtgggctttgaaacctggagcccctcaacccaaggcaaatcaacaacatcaagacaacgctcgaggtcttgtgcttccgggttacaaataccttggacccggcaacggactcgacaagggggagccggtcaacgcagcagacgcggcggccctcgagcacgacaaggcctacgaccagcagctcaaggccggagacaacccgtacctcaagtacaaccacgccgacgccgagttccaggagcggctcaaagaagatacgtcttttgggggcaacctcgggcgagcagtcttccaggccaaaaagaggcttcttgaacctcttggtctggttgaggaagcggctaagacggctcctggaaagaagaggcctgtagagcagtctcctcaggaaccggactcctccgcgggtattggcaaatcgggtgcacagcccgctaaaaagagactcaatttcggtcagactggcgacacagagtcagtcccagaccctcaaccaatcggagaacctcccgcagccccctcaggtgtgggatctcttacaatggcttcaggtggtggcgcaccagtggcagacaataacgaaggtgccgatggagtgggtagttcctcgggaaattggcattgcgattcccaatggctgggggacagagtcatcaccaccagcacccgaacctgggccctgcccacctacaacaatcacctctacaagcaaatctccaacagcacatctggaggatcttcaaatgacaacgcctacttcggctacagcaccccctgggggtattttgacttcaacagattccactgccgcttctcaccacgtgactggcagcgactcatcaacaacaactggggattccggcctaagcgactcaacttcaagctcttcaacattcaggtcaaagaggttacggacaacaatggagtcaagaccatcgccaataaccttaccagcacggtccaggtcttcacggactcagactatcagctcccgtacgtgctcgggtcggctcacgagggctgcctcccgccgttcccagcggacgttttcatgattcctcagtacgggtatctgacgcttaatgatggaagccaggccgtgggtcgttcgtccttttactgcctggaatatttcccgtcgcaaatgctaagaacgggtaacaacttccagttcagctacgagtttgagaacgtacctttccatagcagctacgctcacagccaaagcctggaccgactaatgaatccactcatcgaccaatacttgtactatctctcaaagactattaacggttctggacagaatcaacaaacgctaaaattcagtgtggccggacccagcaacatggctgtccagggaagaaactacatacctggacccagctaccgacaacaacgtgtctcaaccactgtgactcaaaacaacaacagcgaatttgcttggcctggagcttcttcttgggctctcaatggacgtaatagcttgatgaatcctggacctgctatggccagccacaaagaaggagaggaccgtttctttcctttgtctggatctttaatttttggcaaacaaggaactggaagagacaacgtggatgcggacaaagtcatgataaccaacgaagaagaaattaaaactactaacccggtagcaacggagtcctatggacaagtggccacaaaccaccagagtgcccaagcacaggcgcagaccggctgggttcaaaaccaaggaatacttccgggtatggtttggcaggacagagatgtgtacctgcaaggacccatttgggccaaaattcctcacacggacggcaactttcacccttctccgctgatgggagggtttggaatgaagcacccgcctcctcagatcctcatcaaaaacgcccctgtacctgcggatcctccaacggccttcaacaaggacaagctgaactctttcatcacccagtattctactggccaagtcagcgtggagatcgagtgggagctgcagaaggaaaacagcaagcgctggaacccggagatccagtacacttccaactattacaagtctaataatgttgaatttgctgttaatactgaaggtgtatatagtgaaccccgccccattggcaccagatacctgactcgtaatctg

SEQ ID NO: 615 - DNA, 2208 bp, Artificial Sequence
  source: /note="Description of Artificial Sequence: Synthetic polynucleotide"
atggctgccgatggttatcttccagattggctcgaggacaaccttagtgaaggaattcgcgagtggtgggctttgaaacctggagcccctcaacccaaggcaaatcaacaacatcaagacaacgctcgaggtcttgtgcttccgggttacaaataccttggacccggcaacggactcgacaagggggagccggtcagcgcagcagacgcggcggccctcgagcacgacaaggcctacgaccagcagctcaaggccggagacaacccgtacctcaagtacaaccacgccgacgccgagttccaggagcggctcaaagaagatacgtcttttgggggcaacctcgggcgagcagtcttccaggccaaaaagaggcttcttgaacctcttggtctggttgaggaagcggctaagacggctcctggaaagaagaggcctgtagagcagtctcctcaggaaccggactcctccgcgggtattggcaaatcgggtgcacagcccgctaaaaagagactcaatttcggtcagactggcgacacagagtcagtcccagaccctcaaccaatcggagaacctcccgcagccccctcaggtgtgggatctcttacaatggcttcaggtggtggcgcaccagtggcagacaataacgaaggtgccgatggagtgggtagttcctcgggaaattggcattgcgattcccaatggctgggggacagagtcatcaccaccagcacccgaacctgggccctgcccacctacaacaatcacctctacaagcaaatctccaacagcacatctggaggatcttcaaatgacaacgcctacttcggctacagcaccccctgggggtattttgacttcaacagattccactgccacttctcaccgcgtgactggcagcgactcatcaacaacaactggggattccggcctaagcgactcaacttcaagctcttcaacattcaggtcaaagaggttacggacaacaatggagtcaagaccatcgccaataaccttaccagcacggtccaggtcttcacggactcagactatcagctcccgtacgtgctcgggtcggctcacgagggctgcctcccgccgttcccagcggacgttttcatgattcctcagtacgggtatctgacgcttaatgatggaagccaggccgtgggtcgttcgtccttttactgcctggaatatttcccgtcgcaaatgctaagaacgggtaacaacttccagttcagctacgagtttgagaacgtacctttccatagcagctacgctcacagccaaagcctggaccgactaatgaatccactcatcgaccaatacttgtactatctctcaaagactattaacggttctggacagaatcaacaaacgctaaaattcagtgtggccggacccagcaacatggctgtccagggaagaaactacatacctggacccagctaccgacaacaacgtgtctcaaccactgtgactcaaaacaacaacagcgaatttgcttggcctggagcttcttcttgggctctcaatggacgtaatagcttgatgaatcctggacctgctatggccagccacaaagaaggagaggaccgtttctttcctttgtctggatctttaatttttggcaaacaaggaactggaagagacaacgtggatgcggacaaagtcatgataaccaacgaagaagaaattaaaactactaacccggtagcaacggagtcctatggacaagtggccacaaaccaccagagtgcccaagcacaggcgcagaccggctgggttcaaaaccaaggaatacttccgggtatggtttggcaggacagagatgtgtacctgcaaggacccatttgggccaaaattcctcacacggacggcaactttcacccttctccgctgatgggagggtttggaatgaagcacccgcctcctcagatcctcatcaaaaacacacctgtacctgcggatcctccaacggccttcaacaaggacaagctgaactctttcatcacccagtattctactggccaagtcagcgtggagatcgagtgggagctgcagaaggaaaacagcaagcgctggaacccggagatccagtacacttccaactattacaagtctaataatgttgaatttgctgttaatactgaaggtgtatatagtgaaccccgccccattggcaccagatacctgactcgtaatctg

SEQ ID NO: 616 - DNA, 2208 bp, Artificial Sequence
  source: /note="Description of Artificial Sequence: Synthetic polynucleotide"
atggctgccgatggttatcttccagattggctcgaggacaaccttagtgaaggaattcgcgagtggtgggctttgaaacctggagcccctcaacccaaggcaaatcaacaacatcaagacaacgctcgaggtcttgtgcttccgggttacaaataccttggacccggcaacggactcgacaagggggagccggtcaacgcagcagacgcggcggccctcgagcacgacaaggcctacgaccagcagctcaaggccggagacaacccgtacctcaagtacaaccacgccgacgccgagttccaggagcggctcaaagaagatacgtcttttgggggcaacctcgggcgagcagtcttccaggccaaaaagaggcttcttgaacctcttggtctggttgaggaagcggctaagacggctcctggaaagaagaggcctgtagagcagtctcctcaggaaccggactcctccgcgggtattggcaaatcgggtgcacagcccgctaaaaagagactcaatttcggtcagactggcgacacagagtcagtcccagaccctcaaccaatcggagaacctcccgcagccccctcaggtgtgggatctcttacaatggcttcaggtggtggcgcaccagtggcagacaataacgaaggtgccgatggagtgggtagttcctcgggaaattggcattgcgattcccaatggctgggggacagagtcatcaccaccagcacccgaacctgggccctgcccacctacaacaatcacctctacaagcaaatctccaacagcacatctggaggatcttcaaatgacaacgcctacttcggctacagcaccccctgggggtattttgacttcaacagattccactgccacttctcaccacgtgactggcagcgactcatcaacaacaactggggattccggcctaagcgactcaacttcaagctcttcaacattcaggtcaaagaggttacggacaacaatggagtcaagaccatcgccaataaccttaccagcacggtccaggtcttcacggactcagactatcagctcccgtacgtgctcgggtcggctcacgagggctgcctcccgccgttcccagcggacgttttcatgattcctcagtacgggtatctgacgcttaatgatggaagccaggccgtgggtcgttcgtccttttactgcctggaatatttcccgtcgcaaatgctaagaacgggtaacaacttccagttcagctacgagtttgagaacgtacctttccatagcagctacgctcacagccaaagcctggaccgactaatgaatccactcatcgaccaatacttgtactatctctcaaagactattaacggttctggacagaatcaacaaacgctaaaattcagtgtggccggacccagcaacacggctgtccagggaagaaactacatacctggacccagctaccgacaacaacgtgtctcaaccactgtgactcaaaacaacaacagcgaatttgcttggcctggagcttcttcttgggctctcaatggacgtaatagcttgatgaatcctggacctgctatggccagccacaaagaaggagaggaccgtttctttcctttgtctggatctttaatttttggcaaacaaggaactggaagagacaacgtggatgcggacaaagtcatgataaccaacgaagaagaaattaaaactactaacccggtagcaacggagtcctatggacaagtggccacaaaccaccagagtgcccaagcacaggcgcagaccggctgggttcaaaaccaaggaatacttccgggtatggtttggcaggacagagatgtgtacctgcaaggacccatttgggccaaaattcctcacacggacggcaactttcacccttctccgctgatgggagggtttggaatgaagcacccgcctcctcagatcctcatcaaaaacacacctgtacctgcggatcctccaacggccttcaacaaggacaagctgaactctttcatcacccagtattctactggccaagtcagcgtggagatcgagtgggagctgcagaaggaaaacagcaagcgctggaacccggagatccagtacacttccaactattacaagtctaataatgttgaatttgctgttaatactgaaggtgtatatagtgaaccccgccccattggcaccagatacctgactcgtaatctg

SEQ ID NO: 617 - DNA, 2208 bp, Artificial Sequence
  source: /note="Description of Artificial Sequence: Synthetic polynucleotide"
atggctgccgatggttatcttccagattggctcgaggacaaccttagtgaaggaattcgcgagtggtgggctttgaaacctggagcccctcaacccaaggcaaatcaacaacatcaagacaacgctcgaggtcttgtgcttccgggttacaaataccttggacccggcaacggactcgacaagggggagccggtcaacgcagcagacgcggcggccctcgagcacgacaaggcctacgaccagcagctcaaggccggagacaacccgtacctcaagtacaaccacgccgacgccgagttccaggagcggctcaaagaagatacgtcttttgggggcaacctcgggcgagcagtcttccaggccaaaaagaggcttcttgaacctcttggtctggttgaggaagcggctaagacggctcctggaaagaagaggcctgtagagcagtctcctcaggaaccggactcctccgcgggtattggcaaatcgggtgcacagcccgctaaaaagagactcaatttcggtcagactggcgacacagagtcagtcccagaccctcaaccaatcggagaacctcccgcagccccctcaggtgtgggatctcttacaatggcttcaggtggtggcgcaccagtggcagacaataacgaaggtgccgatggagtgggtagttcctcgggaaattggcattgcgattcccaatggctgggggacagagtcatcaccaccagcacccgaacctgggccctgcccacctacaacaatcacctctacaagcaaatctccaacagcacatctggaggatcttcaaatgacaacgcctacttcggctacagcaccccctgggggtattttgacttcaacagattccactgccacttctcaccacgtgactggcagcgactcatcaacaacaactggggattccggcctaagcggctcaacttcaagctcttcaacattcaggtcaaagaggttacggacaacaatggagtcaagaccatcgccaataaccttaccagcacggtccaggtcttcacggactcagactatcagctcccgtacgtgctcgggtcggctcacgagggctgcctcccgccgttcccagcggacgttttcatgattcctcagtacgggtatctgacgcttaatgatggaagccaggccgtgggtcgttcgtccttttactgcctggaatatttcccgtcgcaaatgctaagaacgggtagcaacttccagttcagctacgagtttgagaacgtacctttccatagcagctacgctcacagccaaagcctggaccgactaatgaatccactcatcgaccaatacttgtactatctctcaaagactattaacggttctggacagaatcaacaaacgctaaaattcagtgtggccggacccagcaacatggctgtccagggaagaaactacatacctggacccagctaccgacaacaacgtgtctcaaccactgtgactcaaaacaacaacagcgaatttgcttggcctggagcttcttcttgggctctcaatggacgtaatagcttgatgaatcctggacctgctatggccagccacaaagaaggagaggaccgtttctttcctttgtctggatctttaatttttggcaaacaaggaactggaagagacaacgtggatgcggacaaagtcatgataaccaacgaagaagaaattaaaactactaacccggcagcaacggagtcctatggacaagtggccacaaaccaccagagtgcccaagcacaggcgcagaccggctgggttcaaaaccaaggaatacttccgggtatggtttggcaggacagagatgtgtacctgcaaggacccatttgggccaaaattcctcacacggacggcaactttcacccttctccgctgatgggagggtttggaatgaagcacccgcctcctcagatcctcatcaaaaacacacctgtacctgcggatcctccaacggccttcaacaaggacaagctgaactctttcatcacccagtattctactggccaagtcagcgtggagatcgagtgggagctgcagaaggaaaacagcaagcgctggaacccggagatccagcacacttccaactattacaagtctaataatgttgaatttgctgttaatactgaaggtgtatatagtgaaccccgccccattggcaccagatacctgactcgtaatctg

SEQ ID NO: 618 - DNA, 2208 bp, Artificial Sequence
  source: /note="Description of Artificial Sequence: Synthetic polynucleotide"
atggctgccgatggttatcttccagattggctcgaggacaaccttagtgaaggaattcgcgagtggtgggctttgaaacctggagcccctcaacccaaggcaaatcaacaacatcaagacaacgctcgaggtcttgtgcttccgggttacaaataccttggacccggcaacggactcgacaagggggagccggtcaacgcagcagacgcggcggccctcgagcacgacaaggcctacgaccagcagctcaaggccggagacaacccgtacctcaagtacaaccacgccgacgccgagttccaggagcggctcaaagaagatacgtcttttgggggcaacctcgggcgagcagtcttccaggccaaaaagaggcttcttgaacctcttggtctggttgaggaagcggctaagacggctcctggaaagaagaggcctgtagagcagtctcctcaggaaccggactcctccgcgggtattggcaaatcgggtgcacagcccgctaaaaagagactcaatttcggtcagactggcgacacagagtcagtcccagaccctcaaccaatcggagaacctcccgcagccccctcaggtgtgggatctcttacaatggcttcaggtggtggcgcaccagtggcagacaataacgaaggtgccgatggagtgggtagttcctcgggaaattggcattgcgattcccaatggctgggggacagagtcatcaccaccagcacccgaacctgggccctgcccacctacaacaatcacctctacaagcaaatctccaacagcacatctggaggatcttcaaatgacaacgcctacttcggctacagcaccccctgggggtattttgacttcaacagattccactgccacttctcaccacgtgactggcagcgactcatcaacaacaactggggattccggcctaagcgactcaacttcaggctcttcaacattcaggtcaaagaggttacggacaacaatggagtcaagaccatcgccaataaccttaccagcacggtccaggtcttcacggactcagactatcagctcccgtacgtgctcgggtcggctcacgagggctgcctcccgccgttcccagcggacgttttcatgattcctcagtacgggtatctgacgcttaatgatggaagccaggccgtgggtcgttcgtccttttactgcctggaatatttcccgtcgcaaatgctaagaacgggtaacaacttccagttcagctacgagtttgagaacgtacctttccatagcagctacgctcacagccaaagcctggaccgactaatgaatccactcatcgaccaatacttgtactatctctcaaagactattaacggttctggacagaatcaacaaacgctaaaattcagtgtggccggacccagcaacatggctgtccagggaagaaactacatacctggacccagctaccgacaacaacgtgtctcaaccactgtgactcaaaacaacaacagcgaatttgcttggcctggagcttcttcttgggctctcaatggacgtaatagcttgatgaatcctggacctgctatggccagccacaaagaaggagaggaccgtttctttcctttgtctggatctttaatttttggcaaacaaggaactggaagagacaacgtggatgcggacaaagtcatgataaccaacgaagaagaaattaaaactactaacccggtagcaacggagtcctatggacaagtggccacaaaccaccagagtgcccaagcacaggcgcagaccggctgggttcaaagccaaggaatacttccgggtatggtttggcaggacagagatgtgtacctgcaaggacccatttgggccaaaattcctcacacggacggcaactttcacccttctccgctgatgggagggtttggaatgaagcacccgcctccccagatcctcatcaaaaacacacctgtacctgcggatcctccaacggccttcaacaaggacaagctgaactctttcatcacccagtattctactggccaagtcagcgtggagatcgagtgggagctgcagaaggaaaacagcaagcgctggaacccggagatccagtacacttccaactattacaagtctaataatgttgaatttgctgttaatactgaaggtgtatatagtgaaccccgccccattggcaccagatacctgactcgtaatctg

SEQ ID NO: 619 - DNA, 2205 bp, Artificial Sequence
  source: /note="Description of Artificial Sequence: Synthetic polynucleotide"
atggctgccgatggttatcttccagattggctcgaggacaaccttagtgaaggaattcgcgagtggtgggctttgaaacctggagcccctcaacccaaggcaaatcaacaacatcaagacaacgcccgaggtcttgtgcttccgggttacaaataccttggacccggcaacggactcgacaagggggagccggtcaacgcagcagacgcggcggccctcgagcacgacaaggcctacgaccagcagctcaaggccggagacaacccgtacctcaagtacaaccacgccgacgccgagttccaggagcggctcaaagaagatacgtcttttgggggcaacctcgggcgagcagtcttccaggccaaaaagaggcttcttgaacctcttggtctggttgaggaagcggctaagacggctcctggaaagaagaggcctgtagagcagtctcctcaggaaccggactcctccgcgggtattggcaaatcgggtgcacagcccgctaaaaagagactcaatttcggtcagactggcgacacagagtcagtcccagaccctcaaccaatcggagaacctcccgcagccccctcaggtgtgggatctcttacaatggcttcaggtggtggcgcaccagtggcagacaataacgaaggtgccgatggagtgggtagttcctcgggaaattggcattgcgattcccaatggctgggggacagagtcatcaccaccagcacccgaacctgggccctgcccacctacaacaatcacctctacaagcaaatctccaacagcacatctggaggatcttcaaatgacaacgcctacttcggctacagcaccccctggaggtattttgacttcaacagattccactgccacttctcaccacgtgactggcagcgactcatcaacaactggggattccggcctaagcgactcaacttcaagctcttcaacattcaggtcaaagaggttacggacaacaatggagtcaagaccatcgccaataaccttaccagcacggtccaggccttcacggactcagactatcagctcccgtacgtgctcgggtcggctcacgagggctgcctcccgccgttcccagcggacgttttcatgattcctcagtacgggtatctgacgcttaatgatggaagccaggccgtgggtcgttcgtccttttactgcctggaatatttcccgtcgcaaatgctaagaacgggtaacaacttccagttcagctacgagtttgagaacgtacctttccatagcagctacgctcacagccaaagcctggaccgactaatgaatccactcatcgaccaatacttgtactatctctcaaagactattaacggttctggacagaatcaacaaacgctaaaattcagtgtggccggacccagcaacatggctgtccagggaagaaactacatacctggacccagctaccgacaacaacgtgtctcaaccactgtgactcaaaacaacaacagcgaatttgcttggcctggagcttcttcttgggctctcaatggacgtaatagcttgatgaatcctggacctgctatggccagccacaaagaaggagaggaccgtttctttcctttgtctggatctttaatttttggcaaacaaggaactggaagagacaacgtggatgcggacaaagtcatgataaccaacgaagaagaaattaaaactactaacccggtagcaacggagtcctatggacaagtggccacaaaccaccagagtgcccaagcacaggcgcagaccggctgggttcaaaaccaaggaatacttccgggtatggtttggcaggacagagatgtgtacctgcaaggacccatttgggccaaaattcctcacacggacggcaactttcacccttctccgctgatgggagggtttggaatgaagcacccgcctcctcagatcctcatcaaaaacacacctgtacctgcggatcctccaacggccttcaacaaggacgagctgaactctttcatcacccagtattctactggccaagtcagcgtggagatcgagtgggagctgcagaaggaaaacagcaagcgctggaacccggagatccagtacacttccaactattacaagtctaataatgttgaatttgctgttaatactgaaggtgtatatagtgaaccccgccccattggcaccagatacctgactcgtaatctg

SEQ ID NO: 620 - DNA, 2205 bp, Artificial Sequence
  source: /note="Description of Artificial Sequence: Synthetic polynucleotide"
atggctgccgatggttatcttccagattggctcgaggacaaccttagtgaaggaattcgcgagtggtgggctttgaaacctggagcccctcaacccaaggcaaatcaacaacatcaagacaacgctcgaggtcttgtgcttccgggttacaaataccttggacccggcaacggactcgacaagggggagccggtcaacgcagcagacgcggcggccctcgagcacgacaaggcctacgaccagcagctcaaggccggagacaacccgtacctcaagtacaaccacgccgacgccgagttccaggagcggctcaaagaagatacgtcttttgggggcaacctcgggcgagcagtcttccaggacaaaaagaggcttcttgaacctcttggtctggttgaggaagcggctaagacggctcctggaaagaagaggcctgtagagcagtctcctcaggaaccggactcctccgcgggtattggcaaatcgggtgcacagcccgctaaaaagagactcaatttcggtcagactggcgacacagagtcagtcccagaccctcaaccaatcggagaacctcccgcagccccctcaggtgtgggatctcttacaatggcttcaggtggtggcgcaccagtggcagacaataacgaaggtgccgatggagtgggtagttcctcgggaaattggcattgcgattcccaatggctgggggacagagtcatcaccaccagcacccgaacctgggccctgcccacctacaacaatcacctctacaagcaaatctccaacagcacatctggaggatcttcaaatgacaacgcctacttcggctacagcaccccctgggggtattttgacttcaacagattccactgccacttctcaccacgtgactggcagcgactcatcaacaactggggattccggcctaagcgactcaacttcaagctcttcaacattcaggtcaaagaggttacggacaacaatggagtcaagaccatcgccaataaccttaccagcacggtccaggtcttcacggactcagactatcagctcccgtacgtgctcgggtcggctcacgagggctgcctcccgccgttcccagcggacgttttcatgattcctcagtacgggtatctgacgcttaatgatggaagccaggccgtgggtcgttcgtccttttactgcctggaatatttcccgtcgcaaatgctaagaacgggtaacaacttccaattcagctacgagtttgagaacgtacctttccatagcagctacgctcacagccaaagcctggaccgactaatgaatccactcatcgaccaatacttgtactatctctcaaagactattaacggttctggacagaatcaacaaacgctaaaattcagtgtggccggacccagcaacatggctgtccagggaagaaactacatacctggacccagctaccgacaacaacgtgtctcaaccactgtgactcaaaacaacaacagcgaatttgcttggcctggagcttcttcttgggctctcaatggacgtaatagcttgatgaatcctggacctgctatggccagccacaaagaaggagaggaccgtttctttcctttgtctggatctttaatttttggcaaacaaggaactggaagagacaacgtggatgcggacaaagtcatgataaccaacgaagaagaaattaaaactactaacccggtagcaacggagtcctatggacaagtggccacaaaccaccagagtgcccaagcacaggcgcagaccggctgggttcaaaaccaaggaatacttccgggtatggtttggcaggacagagatgtgtacctgcaaggacccatttgggccaaaattcctcacacggacggcaactttcacccttctccgctgatgggagggtttggaatgaagcacccgcctcctcagatcctcatcaaaaacacacctgtacctgcggatcctccaacggccttcaacaaggacaagctgaactctttcatcacccagtattctactggccaagtcagcgtggagatcgagtgggagctgcagaaggaaaacagcaagcgctggaacccggagatccagtacacttccaactattacaagtctaataatgttgaatttgctgttaatactgaaggtgtatatagtgaaccccgccccattggcaccagatacctgactcgtaatctg

SEQ ID NO: 621 - DNA, 2208 bp, Artificial Sequence
  source: /note="Description of Artificial Sequence: Synthetic polynucleotide"
atggctgccgatggttatcttccagattggctcgaggacaaccttagtgaaggaattcgcgagtggtgggctttgaaacctggagcccctcaacccaaggcaaatcaacaacatcaagacaacgctcgaggtcttgtgcttccgggttacaaataccttggacccggcaacggactcgacaagggggagccggtcaacgcagcagacgcggcggccctcgagcacgacaaggcctacgaccagcagctcaaggccggagacaacccgtacctcaagtacaaccacgccgacgccgagttccaggagcggctcaaagaagatacgtcttttgggggcaacctcgggcgagcagtcttccaggccaaaaagaggcttcttgaacctcttggtctggttgaggaagcggctaagacggctcctggaaagaagaggcctgtagagcagtctcctcaggaaccggactcctccgcgggtattggcaaatcgggtgcacagcccgctaaaaagagactcaatttcggtcagactggcgacacagagtcagtcccagaccctcaaccaatcggagaacctcccgcagccccctcaggtgtgggatctcttacaatggcttcaggtggtggcgcaccagtggcagacaataacgaaggtgccgatggagtgggtagttcctcgggaaattggcattgcgattcccaatggctgggggacagagccatcaccaccagcacccgaacctgggccctgcccacctacaacaatcacctctacaagcaaatctccaacagcacatctggaggatcttcaaatgacaacgcctacttcggctacagcaccccctgggggtattttgacttcaacagattccactgccacttctcaccacgtgactggcagcggctcatcaacaacaactggggattccggcctaagcgactcaacttcaagctcttcaacattcaggtcaaagaggttacggacaacaatggagtcaagaccatcgccaataaccttaccagcacggtccaggtcttcacggactcagactatcagctcccgtacgtgctcgggtcggctcacgagggctgcctcccgccgttcccagcggacgttttcatgattcctcagtacgggtatctgacgcttaatgatggaagccaggccgtgggtcgttcgtccttttactgcctggaatatttcccgtcgcaaatgctaagaacgggtaacaacttccagttcagctacgagtttgagaacgtacctttccatagcagctacgctcacagccaaagcctggaccgactaatgaatccactcatcgaccaatacttgtactatctctcaaagactattaacggttctggacagaatcaacaaacgctaaaattcagtgtggccggacccagcaacatggctgtccagggaagaaactacatacctggacccagctaccgacaacaacgtgtctcaaccactgtgactcaaaacaacaacagcgaatttgcttggcctggagcttcttcttgggctctcaatggacgtaatagcttgatgaatcctggacctgctatggccagccacaaagaaggagaggaccgtttctttcctttgtctggatctttaatttttggcaaacaaggaactggaagagacaacgtggatgcggacaaagtcatgacaaccaacgaagaagaaattaaaactactaacccggtagcaacggagtcctatggacaagtggccacaaaccaccagagtgcccaagcacaggcgcagaccggctgggttcaaaaccaaggaatacttccgggtatggtttggcaggacagagatgtgtacctgcaaggacccatttgggccaaaattcctcacacggacggcaactttcacccttctccgctgatgggagggtttggaatgaagcacccgcctcctcagatcctcatcaaaaacacacctgtacctgcggatcctccaacggccttcaacaaggacaagctgaactctttcatcacccagtattctactggccaagtcagcgtggagatcgagtgggagctgcagaaggaaaacagcaagcgctggaacccggagatccagtacacttccaactattacaagtctaataatgttgaatttgctgttaatactgaaggtgtatatagtgaaccccgccccattggcaccagatacctgactcgtaatctg

SEQ ID NO: 622 - DNA, 2208 bp, Artificial Sequence
  source: /note="Description of Artificial Sequence: Synthetic polynucleotide"
atggctgccgatggttatcttccagattggctcgaggacaaccttagtgaaggaattcgcgagtggtgggctttgaaacctggagcccctcaacccaaggcaaatcaacaacatcaagacaacgctcgaggtcttgtgcttccgggttacaaataccttggacccggcaacggactcgacaagggggagccggtcaatgcagcagacgcggcggccctcgagcacgacaaggcctacgaccagcagctcaaggccggagacaacccgtacctcaagtacaaccacgccgacgccgagttccaggagcggctcaaagaagatacgtcttttgggggcaacctcgggcgagcagtcttccagaccaaaaagaggcttcttgaacctcttggtctggttgaggaagcggctaagacggctcctggaaagaagaggcctgtagagcagtctcctcaggaaccgggctcctccgcgggtattggcaaatcgggtgcacagcccgctaaaaagagactcaatttcggtcagactggcgacacagagtcagtcccagaccctcaaccaatcggagaacctcccgcagccccctcaggtgtgggatctcttacaatggcttcaggtggtggcgcaccagtggcagacaataacgaaggtgccgatggagtgggtagttcctcgggaaattggcattgcgattcccaatggctgggggacagagtcatcaccaccagcacccgaacctgggccctgcccacctacaacaatcacctctacaagcaaatctccaacagcacatctggaggatcttcaaatgacaacgcctacttcggctacagcaccccctgggggtattttgacttcaacagattccactgccacttctcaccacgtgactggcagcgactcatcaacaacaactggggattccggcctaagcgactcaacttcaagctcttcaacattcaggtcaaagaggttacggacaacaatggagtcaagaccatcgccaataaccttaccagcacggtccaggtcttcacggactcagactatcagctcccgtacgtgctcgggtcggctcacgagggctgcctcccgccgttcccagcggacgttttcatgattcctcagtacgggtatctgacgcttaatgatggaagccaggccgtgggtcgttcgtccttttactgcctggaatatttcccgtcgcaaatgctaagaacgggtaacaacttccagttcagctacgagtttgagaacgtacctttccatagcagctacgctcacagccaaagcctggaccgactaatgaatccactcatcgaccaatacttgcactatctctcaaagactattaacggttctggacagaatcaacaaacgctaaaattcagtgtggccggacccagcaacatggctgtccagggaagaaactacatacctggacccagctaccgacaacaacgtgtctcaaccactgtgactcaaaacaacaacagcgaatttgcttggcctggagcttcttcttgggctctcaatggacgtaatagcttgatgaatcctggacctgctatggccagccacaaagaaggagaggaccgtttctttcctttgtctggatctttaatttttggcaaacaaggaactggaagagacaacgtggatgcggacaaagtcatgataaccaacgaagaagaaattaaaactactaacccggtagcaacggagtcctatggacaagtggccacaaaccaccagagtgcccaagcacaggcgcagaccggctgggttcaaaaccaaggaatacttccgggtatggtttggcaggacagagatgtgtacctgcaaggacccatttgggccaaaattcctcacacggacggcaactttcacccttctccgctgatgggagggtttggaatgaagcacccgcctcctcagatcctcatcaaaaacacacctgtacctgcggatcctccaacggccttcaacaaggacaagctgaactctttcatcacccagtattctactggccaagtcagcgtggagatcgagtgggagctgcagaaggaaaacagcaagcgctggaacccggagatccagtacacttccaactattacaagtctaataatgttgaatttgctgttaatactgaaggtgtatatagtgaaccccgccccattggcaccagatacctgactcgtaatctg

SEQ ID NO: 623 - DNA, 2208 bp, Artificial Sequence
  source: /note="Description of Artificial Sequence: Synthetic polynucleotide"
atggctgccgatggttattttccagattggctcgaggacaaccttagtgaaggaattcgcgagtggtgggctttgaaacctggagcccctcaacccaaggcaaatcaacaacatcaagacaacgctcgaggtcttgtgcttccgggttacaaataccttggacccggcaacggactcgacaagggggagccggtcaacgcagcagacgcggcggccctcgagcacgacaaggcctacgaccagcagctcaaggccggagacaacccgtacctcaagtacaaccacgccgacgccgagttccaggagcggctcaaagaagatacgtcttttgggggcaacctcgggcgagcagtcttccaggccaaaaagaggcttcttgaacctcttggtctggttgaggaagcggctaagacggctcctggaaagaagaggcctgtagagcagtctcctcaggaaccggactcctccgcgggtattggcaaatcgggtgcacagcccgctaaaaagagactcaatttcggtcagactggcgacacagagtcagtcccagaccctcaaccaatcggagaatctcccgcagccccctcaggtgtgggatctcttacaatggcttcaggtggtggcgcaccagtggcagacaataacgaaggtgccgatggagtgggtagttcctcgggaaattggcattgcgattcccaatggctgggggacagagtcatcaccaccagcacccgaacctgggccctgcccacctacaacaatcacctctacaagcaaatctccaacagcacatctggaggatcttcaaatgacaacgcctacttcggctacagcaccccctgggggtattttgacttcaacagattccactgccacttctcaccacgtgactggcagcgactcatcaacaacaactggggattccggcctaagcgactcaacttcaagctcttcaacattcaggtcaaagaggttacggacaacaatggagtcaagaccatcgccaataaccttaccagcacggtccaggtcttcacggactcagactatcagctcccgtacgtgctcgggtcggctcacgagggctgcctcccgccgttcccagcggacgttttcatgattcctcagtacgggtatctgacgcttaatgatggaagccaggccgtgggtcgttcgtccttttactgcctggaatatctcccgtcgcaaatgctaagaacgggtaacaacttccagttcagctacgagtttgagaacgtacctttccatagcagctacgctcacagccaaagcctggaccgactaatgaatccactcatcgaccaatacttgcactatctctcaaagactattaacggttctggacagaatcaacaaacgctaaaattcagtgtggccggacccagcaacatggctgtccagggaagaaactacatacctggacccagctaccgacaacaacgtgtctcaaccactgtgactcaaaacaacaacagcgaatttgcttggcctggagcttcttcttgggctctcaatggacgtaatagcttgatgaatcctggacctgctgtggccagccacaaagaaggagaggaccgtttctttcctttgtctggatctttaatttttggcaaacaaggaactggaagagacaacgtggatgcggacaaagtcatgataaccaacgaagaagaaattaaaactactaacccggtagcaacggagtcctatggacaagtggccacaaaccaccagagtgcccaagcacaggcgcagaccggctgggttcaaaaccaaggaatacttccgggtatggtttggcaggacagagatgtgtacctgcaaggacccatttgggccaaaattcctcacacggacggcaactttcacccttctccgctgatgggagggtttggaatgaagcacccgcctcctcagatcctcatcaaaaacacacctgtacctgcggatcctccaacggccttcaacaaggacaagctgaactctttcatcacccagtattctactggccaagtcagcgtggagatcgagtgggagctgcagaaggaaaacagcaagcgctggaacccggagatccagtacacttccaactattacaagtctaataatgttgaatttgctgttaatactgaaggtgtatatagtgaaccccgccccattggcaccagatacctgactcgtaatctg

SEQ ID NO: 624 - DNA, 2208 bp, Artificial Sequence
  source: /note="Description of Artificial Sequence: Synthetic polynucleotide"
atggctgccgatggttatcttccagattggctcgaggacaaccttagtgaaggaattcgcgagtggtgggctttgaaacctggagcccctcaacccaaggcaaatcaacaacatcaagacaacgctcgaggtcttgtgcttccgggttacaaataccttggacccggcaacggactcgacaagggggagccggtcaacgcagcagacgcggcggccctcgagcacgacaaggcctacgaccagcagctcaaggccggagacaacccgtacctcaagtacaaccacgccgacgccgagttccaggagcggctcaaagaagatacgtcttttgggggcaacctcgggcgagcagtcttccaggccaaaaagaggcttcttgaacctcttggtccggttgaggaagcggctaagacggctcctggaaagaagaggcctgtagagcagtctcctcaggaaccggactcctccgcgggtattggcaaatcgggtgcacagcccgctaaaaagagactcaatttcggtcagactggcgacacagagtcagtcccagaccctcaaccaatcggagaacctcccgcagccccctcaggtgtgggatctcttacaatggcttcaggtggtggcgcaccagtggcagacaataacgaaggtgccgatggagtgggtagttcctcgggaaattggcattgcgattcccaatggctgggggacagagtcatcaccaccagcacccgaacctgggccctgcccacctacaacaatcacctctacaagcaaatctccaacagcacatctggaggatcttcaaatgacaacgcctacttcggctacagcaccccctgggggtattttgacttcaacagattccactgccacttctcaccacgtgactggcagcgactcatcaacaacaactggggattccggcctaagcgactcaacttcaagctcttcaacattcaggtcaaagaggttacggacaacaatggagtcaagaccatcgccaataaccttaccagcacggtccaggtcttcacggactcagactatcagctcccgtacgtgctcgggtcggctcacgagggctgcctcccgccgttcccagcggacgttttcatgattcctcagtacgggtatctgacgcttaatgatggaagccaggccgtgggtcgttcgtccttttactgcctggaatatttcccgtcgcaaatgctaagaacgggtaacaacttccagttcagctacgagtttgagaacgtacctttccatagcagctacgctcacagccaaagcctggaccgactaatgaatccactcatcgaccaatacttgtactatctctcaaagactattaacggttctggacagaatcaacaaacgctaaaattcagtgtggccggacccagcaacatggctgtccagggaagaaactacatacctggacccagctaccgacaacaacgtgtctcaaccactgtgactcaaaacaacaacagcgaatttgcttggcctggagcttcttcttgggctctcaatggacgtaatagcttgatgaatcctggacctgctatggccagccacaaagaaggagaggaccgtttctttcctttgtctggatctttaatttttggcaaacaaggaactggaagagacaacgtggatgcggacaaagtcatgataaccaacgaagaagaaattaaaactactaacccggtagcaacggagtcctatggacaagcggccacaaaccaccagagtgcccaagcacaggcgcagaccggctgggttcaaaaccaaggaatacttccgggtatggtttggcaggacagagatgtgtacctgcaaggacccatttgggccaaaattcctcacacggacggcaactttcacccttctccgctgatgggagggtttggaatgaagcacccgcctcctcagatcctcatcaaaaacacacctgtacctgcggatcctccaacggccttcaacaaggacaagctgaactctttcatcacccagtattctactggccaagtcagcgtggagatcgagtgggagctgcagaaggaaaacagcaagcgctggaacccggagatccagtacacttccaactattacaagtctaataatgttgaatttgctgttaatactgaaggtgtatatagtgaaccccgccccattggcaccagatacctgactcgtaatctg

SEQ ID NO: 625 - DNA, 2208 bp, Artificial Sequence
  source: /note="Description of Artificial Sequence: Synthetic polynucleotide"
atggctgccgatggttatcttccagattggctcgaggacaaccttagtgaaggaattcgcgagtggtgggctttgaaacctggagcccctcaacccaaggcaaatcaacaacatcaagacaacgctcggggtcttgtgcttccgggttacaaataccttggacccggcaacggactcgacaagggggagccggtcaacgcagcagacgcggcggccctcgagcacgacaaggcctacgaccagcagctcaaggccggagacaacccgtacctcaagtacaaccacgccgacgccgagttccaggagcggctcaaagaagatacgtcttttgggggcaacctcgggcgagcagtcttccaggccaaaaagaggcttcttgaacctcttggtccggttgaggaagcggctaagacggctcctggaaagaagaggcctgtagagcagtctcctcaggaaccggactcctccgcgggtattggcaaatcgggtgcacagcccgctaaaaagagactcaatttcggtcagactggcgacacagagtcagtcccagaccctcaaccaatcggagaacctcccgcagccccctcaggtgtgggatctcttacaatggcttcaggtggtggcgcaccagtggcagacaataacgaaggtgccgatggagtgggtagttcctcgggaaattggcattgcgattcccaatggctgggggacagagtcatcaccaccagcacccgaacctgggccctgcccacctacaacaatcacctctacaagcaaatctccaacagcacatctggaggatcttcaaatgacaacgcctacttcggctacagcaccccctgggggtattttgacttcaacagattccactgccacttctcaccacgtgactggcggcgactcatcaacaacaactggggattccggcctaagcgactcaacttcaagctcttcaacattcaggtcaaagaggttacggacaacaatggagtcaagaccatcgccaataaccttaccagcacggtccaggtcttcacggactcagactatcagctcccgtacgtgctcgggtcggctcacgagggctgcctcccgccgttcccagcggacgttttcatgattcctcagtacgggtatctgacgcttaatgatggaagccaggccgtgggtcgttcgtccttttactgcctggaatatttcccgtcgcaaatgctaagaacgggtaacaacttccagttcagctacgagtttgagaacgtacctttccatagcagctacgctcacagccaaagcctggaccgactaatgaatccactcatcgaccaatacttgtactatctctcaaagactattaacggttctggacagaatcaacaaacgctaaaattcagtgtggccggacccagcaacatggctgtccagggaagaaactacatacctggacccagctaccgacaacaacgtgtctcaaccactgtgactcaaaacaacaacagcgaatttgcttggcctggagcttcttcttgggctctcaatggacgtaatagcttgatgaatcctggacctgctatggccagccacaaagaaggagaggaccgtttctttcctttgtctggatctttaatttttggcaaacaaggaactggaagagacaacgtggatgcggacaaagtcatgataaccaacgaagaagaaattaaaactactaacccggtagcaacggagtcctatggacaagtggccacaaaccaccagagtgcccaagcacaggcgcagaccggctgggttcaaaaccaaggaatacttccgggtatggtttggcaggacagagatgtgtacctgcaaggacccatttgggccaaaattcctcacacggacggcaactttcacccttctccgctgatgggagggtttggaatgaagcacccgcctcctcagatcctcatcaaaaacacacctgtacctgcggatcctccaacggccttcaacaaggacaagctgaactctttcatcacccagtattctactggccaagtcagcgtggagatcgagtgggagctgcagaaggaaaacagcaagcgctggaacccggagatccagtacacttccaactattacaagtctaataatgttgaatttgctgttaatactgaaggtgtatatagtgaaccccgccccattggcaccagatacctgactcgtaatctg

SEQ ID NO: 626 - DNA, 2208 bp, Artificial Sequence
  source: /note="Description of Artificial Sequence: Synthetic polynucleotide"
atggctgccgatggttatcttccagattggctcgaggacaaccttagtgaaggaattcgcgagtggtgggctttgaaacctggagcccctcaacccaaggcaaatcaacaacatcaagacaacgctcgaggtcttgtgcttccgggttacaaataccttggacccggcaacggactcgacaagggggagccggtcaacgcagcagacgcggcggccctcgagcacgacaaggcctacgaccagcagctcaaggccggagacaacctgtacctcaagtacaaccacgccgacgccgagttccaggagcggctcaaagaagatacgtcttttgggggcaacctcgggcgagcagtcttccaggccaaaaagaggcttcttgaacctcttggtctggttgaggaagcggctaagacggctcctggaaagaagaggcctgtagagcagtctcctcaggaaccggactcctccgcgggtattggcaaatcgggtgcacagcccgctaaaaagagactcaatttcggtcagactggcgacacagagtcagtcccagaccctcaaccaatcggagaacctcccgcagccccctcaggtgtgggatctcttacaatggcttcaggtggtggcgcaccagtggcagacaataacgaaggtgccgatggagtgggtagttcctcgggaaattggcattgcgattcccaatggctgggggacagagtcatcaccaccagcacccgaacctgggccctgcccacctacaacaatcacctctacaagcaaatctccaacagcacatctggaggatcttcaaatgacaacgcctacttcggctacagcaccccctgggggtattttgacttcaacagattccactgccacttctcaccacgtgactggcagcgactcatcaacaacaactggggattccggcctaagcgactcaacttcaagctcttcaacattcaggtcaaagaggttacggacaacaatggagtcaagaccatcgccaataaccttaccagcacggtccaggtcttcacggactcagactatcagctcccgtacgtgctcgggtcggctcacgagggctgcctcccgccgttcccagcggacgttttcatgattcctcagtacgggtatctgacgcttaatgatggaagccaggccgtgggtcgttcgtccttttactgcctggaatatttcccgtcgcaaatgctaagaacgggtaacaacttccagttcagctacgagtttgagaacgtacctttccatagcagctacgctcacagccaaagcctggaccgactaatgaatccactcatcgaccaatacttgcactatctctcaaagactattaacggttctggacagaatcaacaaacgctaaaattcagtgtggccggacccagcaacatggctgtccagggaagaaactacatacctggacccagctaccgacaacaacgtgtctcaaccactgtgactcaaaacaacaacagcgaatttgcttggcctggagcttcttcttgggctctcaatggacgtaatagcttgatgaatcctggacctgctatggccagccacaaagaaggagaggaccgtttctttcctttgtctggatctttaatttttggcaaacaaggaactggaagagacaacgtggatgcggacaaagtcatgataaccaacgaagaagaaattaaaactactaacccggtagcaacggagtcctatggacaagtggccacaaaccaccagagtgcccaagcacaggcgcagaccggctgggttcaaaaccaaggaatacttccgggtatggtttggcaggacagagatgtgtacctgcaaggacccatttgggccaaaattcctcacacggacggcaactttcacccttctccgctgatgggagggtttggaatgaagcacccgcctcctcagatcctcatcaaaaacacacctgtacctgcggatcctccaacggccttcaacaaggacaagctgaactctttcatcacccagtattctactggccaagtcagcgtggagatcgagtgggagctgcagaaggaaaacagcaagcgctggaacccggagatccagtacacttccaactattacaagtctaataatgttgaatttgctgttaatactgaaggtgtatatagtgaaccccgccccattggcaccagatacctgactcgtaatctg

SEQ ID NO: 627 - DNA, 2208 bp, Artificial Sequence
  source: /note="Description of Artificial Sequence: Synthetic polynucleotide"
atggctgccgatggttatcttccagattggctcgaggacaaccttagtgaaggaattcgcgagtggtgggctttgaaacctggagcccctcaacccaaggcaaatcaacaacatcaagacaacgctcgaggtcttgtgcttccgggttacaaataccttggacccggcaacggactcgacaagggggagccggtcaacgcagcagacgcggcggccctcgagcacgacaaggcctacgaccagcagctcaaggccggagacaacccgtacctcaagtacaaccacgccgacgccgagttccaggagcggctcaaagaagatacgtcttttgggggcaacctcgggcgagcagtcttccaggccaaaaagaggcttcttgaacctcttggtctggttgaggaagcggctaagacggctcctggaaagaagaggcctgtagagcagtctcctcaagaaccggactcctccgcgggtattggcaaatcgggtgcacagcccgctaaaaagagactcaatttcggtcagactggcgacacagagtcagtcccagaccctcaaccaatcggagaacctcccgcagccccctcaggtgtgggatctcttacaatggcttcaggtggtggcgcaccagtggcagacaataacgaaggtgccgatggagtgggtagttcctcgggaaattggcattgcgattcccaatggctgggggacagagtcatcaccaccagcacccgaacctgggccctgcccacctacaacaatcacctctacaagcaaatctccaacagcacatctggaggatcttcaaatgacaacgcctacttcggctacagcaccccctgggggtattttgacttcaacagattccactgccacttctcaccacgtgactggcagcgactcatcaacaacaactggggattccggcctaagcgactcaacttcaagctcttcaacattcaggtcaaagaggttacggacaacaatggagtcaagaccatcgccaataaccttaccagcacggtccaggtcttcacggactcagactatcagctcccgtacgtgctcgggtcggctcacgagggctgcctcccgccgttcccagcggacgttttcatgattcctcagtacgggtatctgacgcttaatgatggaagccaggccgtgggtcgttcgtccttttactgcctggaatatttcccgtcgcaaatgctaagaacgggtaacaacttccagttcagctacgagtttgagaacgtacctttccatagcagctacgctcacagccaaagcctggaccgactaatgaatccactcatcgaccaatacttgcactatctctcaaagactattaacggttctggacagaatcaacaaacgctaaaattcagtgtggccggacccagcaacatggctgtccagggaagaaactacatacctggacccagctaccgacaacaacgtgtctcaaccactgtgactcaaaacaacaacagcgaatttgcttggcctggagcttcttcttgggctctcaatggacgtaatagcttgatgaatcctggacctgctatggccagccacaaagaaggagaggaccgtttctttcctttgtctggatctttaatttttggcaaacaaggaactggaagagacaacgtggatgcggacaaagtcatgataaccaacgaagaagaaattaaaactactaacccggtagcaacggagtcctatggacaagtggccacaaaccaccagagtgcccaagcacaggcgcagaccggctgggttcaaaaccaaggaatacttccgggtatggtttggcaggacagagatgtgtacctgcaaggacccatttgggccaaaattcctcacacggacggcaactttcacccttctccgctgatgggagggtttggaatgaagcacccgcctcctcagatcctcatcaaaaacacacctgtacctgcggatcctccaacggccttcaacaaggacaagctgaactctttcatcacccagtattctactggccaagtcagcgtggagatcgagtgggagctgcagaaggaaaacagcaagcgctggaacccggagatccagtacacttccaactattacaagtctaataatgttgaatttgctgttaatactgaaggtgtatatagtgaaccccgccccattggcaccagatacctgactcgtaatctg

SEQ ID NO: 628 - DNA, 2208 bp, Artificial Sequence
  source: /note="Description of Artificial Sequence: Synthetic polynucleotide"
  modified_base (1325)..(1325): a, c, t, or g
atggctgccgatggttatcttccagattggctcgaggacaaccttagtgaaggaattcgcgagtggtgggctttgaaacctggagcccctcaacccaaggcaaatcaacaacatcaagacaacgctcgaggtcttgtgcttccgggttacaaataccttggacccggcaacggactcgacaagggggagccggtcaacgcagcagacgcggcggccctcgagcacgacaaggcctacgaccagcagctcaaggccggagacaacccgtacctcaagtacaaccacgccgacgccgagttccaggagcggctcaaagaagatacgtcttttgggggcaacctcgggcgagcagtcttccaggccaaaaagaggcttcttgaacctcttggtctggttgaggaagcggctaagacggctcctggaaagaagaggcctgtagagcagtctcctcaggaaccggactcctccgcgggtattggcaaatcgggtgcacagcccgctaaaaagagactcaatttcggtcagactggcgacacagagtcagtcccagaccctcaaccaatcggagaacctcccgcagccccctcaggtgtgggatctcttacaatggcttcaggtggtggcgcaccagtggcagacaataacgaaggtgccgatggagtgggtagttcctcgggaaattggcattgcgattcccaatggctgggggacagagtcatcaccaccagcacccgaacctgggccctgcccacctacaacaatcacctctacaagcaaatctccaccagcacatctggaggatcttcaaatgacaacgcctacttcggctacagcaccccctgggggtattttgacttcaacagattccactgccacttctcaccacgtgactggcagcgactcatcaacaacaactggggattccggcctaagcgactcaacttcaagctcttcaacattcaggtcaaagaggttacggacaacaatggagtcaagaccatcgccaataaccttaccagcacggtccaggtcttcacggactcagactatcagctcccgtacgtgctcgggtcggctcacgagggctgcctcccgccgttcccagcggacgttttcatgattcctcagtacgggtatctgacgcttaatgatggaagccaggccgtgggtcgttcgtccttttactgcctggaatatttcccgtcgcaaatgctaagaacgggtaacaacttccagttcagctacgagtttgagaacgtacctttccatagcagctacgctcacagccaaagcctggaccgactaatgaatccactcatcgaccnatacttgcactatctctcaaagactattaacggttctggacagaatcaacaaacgctaaaattcagtgtggccggacccagcaacatggctgtccagggaagaaactacatacctggacccagctaccgacaacaacgtgtctcaaccactgtgactcaaaacaacaacagcgaatttgcttggcctggagcttcttcttgggctctcaatggacgtaatagcttgatgaatcctggacctgctatggccagccacaaagaaggagaggaccgtttctttcctttgtctggatctttaatttttggcaaacaaggaactggaagagacaacgtggatgcggacaaagtcatgataaccaacgaagaagaaattaaaactactaacccggtagcaacggagtcctatggacaagtggccacaaaccaccagagtgcccaagcacaggcgcagaccggctgggttcaaaaccaaggaatacttccggatatggtttggcaggacagagatgtgtacctgcaaggacccatttgggccaaaattcctcacacggacggcaactttcacccttctccgctgatgggagggtttggaatgaagcacccgcctcctcagatcctcatcaaaaacacacctgtacctgcggatcctccaacggccttcaacaaggacaagctgaactctttcatcacccagtattctactggccaagtcagcgtggagatcgagtgggagctgcagaaggaaaacagcaagcgctggaacccggagatccagtacacttccaactattacaagtctaataatgttgaatttgctgttaatactgaaggtgtatatagtgaaccccgccccattggcaccagatacctgactcgtaatctg

SEQ ID NO: 629 - DNA, 2208 bp, Artificial Sequence
  source: /note="Description of Artificial Sequence: Synthetic polynucleotide"
atggctgccgatggttatcttccagattggctcgaggacaaccttagtgaaggaattcgcgagtggtgggctttgaaacctggagcccctcaacccaaggcaaatcaacaacatcaagacaacgctcgaggtcttgtgcttccgggttacaaataccttggacccggcaacggactcgacaagggggagccggtcaacgcagcagacgcggcggccctcgagcacgacaaggcctacgaccagcagctcaaggccggagacaacccgtacctcaagtacaaccacgccgacgccgagttccaggagcggctcaaagaagatacgtcttttgggggcaacctcgggcgagcagtcttccaggccaaaaagaggcttcttgaacctcttggtctggttgaggaagcggctaagacggctcctggaaagaagaggcctgtagagcagtctcctcaggaaccggactcctccgcgggtattggcaaatcgggtgcacagcccgctaaaaagagactcaatttcggtcagactggcgacacagagtcagtcccagaccctcaaccaatcggagaacctcccgcagccccctcaggtgtgggatctcttacaatggcttcaggtggtggcgcaccagtggcagacaataacgaaggtgccgatggagtgggtagttcctcgggaaattggcattgcgattcccaatggctgggggacagagtcatcaccaccagcacccgaacctgggccctgcccacctacaacaatcacctctacaagcaaatctccaacagcacatctggaggatcttcaaatgacaacgcctacttcggctacagcaccccctgggggtattttgacttcaacagattccactgccacttctcaccacgtgactggcagcgactcatcaacaacaactggggattccggcctaagcgactcaacttcaagctcttcaacattcaggtcaaagaggttacggacaacaatggagtcaagaccatcgccaataaccttaccagcacggtccaggtcttcacggactcagactatcagctcccgtacgtgctcgggtcggctcacgagggctgcctcccgccgttcccagcggacgttttcatgattcctcagtacgggtatctgacgcttaatgatggaagccaggccgtgggtcgttcgtccttttactgcctggaatatttcccgtcgcaaatgctaagaacgggtaacaacttccagttcagctacgagtttgagaacgtacctttccatagcagctacgctcacagccaaagcctggaccgactaatgaatccactcatcgaccaatacttgcactatctctcaaagactattaacggttctggacagaatcaacaaacgctaaaattcagtgtggccggacccagcaacatggctgtccagggaagaaactacatacctggacccagctaccgacaacaacgtgtctcaaccactgtgactcaaaacaacaacagcgaatttgcttggcctggagcttcttcttgggctctcaatggacgtaatagcttgatgaatcctggacctgctatggccagctacaaagaaggagaggacagtttctttcctttgtctggatctttaatttttggcaaacaaggaactggaagagacaacgtggatgcggacaaagtcatgataaccaacgaagaagaaattaaaactactaacccggtagcaacggagtcctatggacaagtggccacaaaccaccagagtgcccaagcacaggcgcagaccggctgggttcaaaaccaaggaatacttccgggtatggtttggcaggacagagatgtgtacctgcaaggacccatttgggccaaaattcctcacacggacggcaactttcacccttctccgctgatgggagggtttggaatgaagcacccgcctcctcagaccctcatcaaaaacacacctgtacctgcggatcctccaacggccttcaacaaggacaagctgaactctttcatcacccagtattctactggccaagtcagcgtggagatcgagtgggagctgcagaaggaaaacagcaagcgctggaacccggagatccagtacacttccaactattacaagtctaataatgttgaatttgctgttaatactgaaggtgtatatagtgaaccccgccccattggcaccagatacctgactcgtaatctg

SEQ ID NO: 630 - DNA, 2208 bp, Artificial Sequence; identical to SEQ ID NO: 613
  source: /note="Description of Artificial Sequence: Synthetic polynucleotide"

SEQ ID NO: 631 - DNA, 2208 bp, Artificial Sequence
  source: /note="Description of Artificial Sequence: Synthetic polynucleotide"
atggctgccgatggttatcttccagattggctcgaggacaaccttagtgaaggaattcgcgagtggtgggctttgaaacctggagcccctcaacccagggcaaatcaacaacatcaagacaacgctcgaggtcttgtgcttccgggttacaaataccttggacccggcaacggactcgacaagggggagccggtcaacgcagccgacgcggcggccctcgagcacgacaaggcctacgaccagcagctcaaggccggagacaacccgtacctcaagtacaaccacgccgacgccgagttccaggagcggctcaaagaagatacgtcttttgggggcaacctcgggcgagcagtcttccaggccaaaaagaggcttcttgaacctcttggtctggttgaggaagcggctaagacggctcctggaaagaagaggcctgtagagcagtctcctcaggaaccggactcctccgcgggtattggcaaatcgggtgcacagcccgctaaaaagagactcaatttcggtcagactggcgacacagagtcagtcccagaccctcaaccaatcggagaacctcccgcagccccctcaggtgtgggatctcttacaatggcttcaggtggtggcgcaccagtggcagacaataacgaaggtgccgatggagtgggtagttcctcgggaaattggcattgcgattcccaatggctgggggacagagtcatcaccaccagcacccgaacctgggccctgcccacctacaacaatcacctctacaagcaaatctccaacagcacatctggaggatcttcaaatgacaacgcctacttcggctacagcaccccctgggggtattttgacttcaacagattccactgccacttctcaccacgtgactggcagcgactcatcaacaacaactggggattccggcctaagcgactcaacttcaagctcttcaacattcaggtcaaagaggttacggacaacaatggagtcaagaccatcgccaataaccttaccagcacggtccaggtcttcacggactcagactgtcagctcccgtacgtgctcgggtcggctcacgagggctgcctcccgccgttcccagcggacgttttcatgattcctcagtacgggtatctgacgcttaatgatggaagccaggccgtgggtcgttcgtccttttactgcctggaatatttcccgtcgcaaatgctaagaacgggtaacaacttccagttcagctacgagtttgagaacgtacctttccatagcagctacgctcacagccaaagcctggaccgactaacgaatccactcatcgaccaatacttgtactatctctcaaagactattaacggttctggacagaatcaacaaacgctaaaattcagtgtggccggacccagcaacatggctgtccagggaagaaactacatacctggacccagctaccgacaacaacgtgtctcaaccactgtgactcaaaacaacaacagcgaatttgcttggcctggagcttcttcttgggctctcaatggacgtaatagcttgatgaatcctggacctgctatggccagccacaaagaaggagaggaccgtttctttcctttgtctggatctttaatttttggcaaacaaggaactggaagagacaacgtggatgcggacaaagtcatgataaccaacgaagaagaaattaaaactactaacccggtagcaacggagtcccatggacaagtggccacaaaccaccagagtgcccaagcacaggcgcagaccggctgggttcaaaaccaaggaatacttccgggtatggtttggcaggacagagatgtgtacctgcaaggacccatttgggccaaaattcctcacacggacggcaactttcacccttctccgctgatgggagggtttggaatgaagcacccgcctcctcagatcctcatcaaaaacacacctgtacctgcggatcctccaacggccttcaacaaggacaagctgaactctttcatcacccagtattctactggccaagtcagcgtggagatcgagtgggagctgcagaaggaaaacagcaagcgctggaacccggagatccagtacacttccaactattacaagtctaataatgttgaatttgctgttaatactgaaggtgtatatagtgaaccccgccccattggcaccagatacctgactcgtaatctg

SEQ ID NO: 632 - DNA, 2208 bp, Artificial Sequence
  source: /note="Description of Artificial Sequence: Synthetic polynucleotide"
atggctgccgatggttatcttccagattggctcgaggacaaccttagtgaaggaattcgcgagtggtgggctttgaaacctggagcccctcaacccaaggcaaatcaacaacatcaagacaacgctcgaggtcttgtgcttccgggttacaaataccttggacccggcaacggactcgacaagggggagccggtcaacgcagcagacgcggcggccctcgagcacgacaaggcctacgaccagcagctcaaggccggagacaacccgtacctcaagtacaaccacgccgacgccgagttccaggagcggctcaaagaagatacgtcttttgggggcaacctcgggcgagcagtcttccaggccaaaaagaggcttcttgaacctcttggtctggttgaggaagcggctaagacggctcctggaaagaagaggcctgtagagcagtctcctcaggaaccggactcctccgcgggtattggcaaatcgggtgcacagcccgctaagaagagactcaatttcggtcagactggcgacacagagtcagtcccagaccctcaaccaatcggagaacctcccgcagccccctcaggtgtgggatctcttacaatggcttcaggtggtggcgcaccagtggcagacaataacgaaggtgccgatggagtgggtagttcctcgggaaattggcattgcgattcccaatggctgggggacagagtcatcaccaccagcacccgaacctgggccctgcccacctacaacaatcacctctacaagcaaatctccaacagcacatctggaggatcttcaaatgacaacgcctacttcggctacagcaccccctgggggtattttgacttcaacagattccactgccacttctcaccacgtgactggcagcgactcatcaacaacaactggggattccggcctaagcgactcaacttcaagctcttcaacattcaggtcaaagaggttacggacaacaatggagtcaagaccatcgccaataaccttaccagcacggtccaggtcttcacggactcagactatcagctcccgtacgtgctcgggtcggctcacgagggctgcctcccgccgttcccagcggacgttttcatgattcctcagtacgggtatctgacgcttaatgatggaagccaggccgtgggtcgttcgtccttttactgcctggaatatttcccgtcgcaaatgctaagaacgggtaacaacttccagttcagctacgagtttgagaacgtacctttccatagcagctacgctcacagccaaagcctggaccgactaatgaatccacccatcgaccaatacttgtactatctctcaaagactattaacggttctggacagaatcaacaaacgctaaaattcagtgtggccggacccagcaacatggctgtccagggaagaaactacatacctggacccagctaccgacaacaacgtgtctcaaccactgtgactcaaaacaacaacagcgaatttgcttggcctggagcttcttcttgggctctcaatggacgtaatagcttgatgaatcctggacctgctatggccagccacaaagaaggagaggaccgtttctttcctttgtctggatctttaatttttggcaaacaaggaactggaagagacaacgtggatgcggacaaagtcatgataaccaacgaagaagaaattaaaactactaacccggtagcaacggagtcctatggacaagtggccacaaaccaccagagtgcccaagcacaggcgcagaccggctgggttcaaaaccaaggaatacttccgggtatggtttggcaggacagagatgtgtacctgcaaggacccatttgggccaaaattcctcacacggacggcaactttcacccttctccgctgatgggagggtttggaatgaagcacccgcctcctcagatcctcatcaaaaacacacctgtacctgcggatcctccaacggccttcaacaaggacaagctgaactctttcatcacccagtattctactggccaagtcagcgtggagatcgagtgggagctgcagaaggaaaacagcaagcgctggaacccggagatccagtacacttccaactattacaagtctaataatgttgaatttgctgttaatactgaaggtgtatatggtgaaccccgccccattggcaccagatacctgactcgtaatctg

SEQ ID NO: 633 - DNA, 2208 bp, Artificial Sequence
  source: /note="Description of Artificial Sequence: Synthetic polynucleotide"
atggctgccgatggttatcttccagattggctcgaggacaaccttagtgaaggaattcgcgagtggtgggctttgaaacctggagcccctcaacccaaggcaaatcaacaacatcaagacaacgctcgaggtcttgtgcttccgggttacaaataccttggacccggcaacggactcgacaagggggagccggtcaacgcagcagacgcggcggccctcgagcacgacaaggcctacgaccagcagctcaaggccggagacaacccgtacctcaagtacaaccacgccgacgccgagttccaggagcggctcaaagaagatacgtcttttgggggcaacctcgggcgagcagtcttccaggccaaaaagaggcttcttgaacctcttggtctggttgaggaagcggctaagacggctcctggaaagaagaggcctgtagagcagtctcctcaggaaccggactcctccgcgggtattggcaaatcgggtgcacagcccgctaaaaagagactcaatttcggtcagactggcgacacagagtcagtcccagaccctcaaccaatcggagaacctcccgcagccccctcaggtgtgggatctcttacaatggcttcaggtggtggcgcaccagtggcagacaataacgaaggtgccgatggagtgggtagttcctcgggaaattggcattgcgattcccaatggctgggggacagagtcatcaccaccagcacccgaacctgggccctgcccacctacaacaatcacctctacaagcaaatctccaacagcacatctggaggatcttcaaatgacaacgcctacttcggctacagcaccccctgggggtattttgacttcaacagattccactgccacttctcaccacgtgaccggcagcgactcatcaacaacaactggggattccggcctaagcgactcaacttcaagctcttcaacattcaggtcaaagaggttacggacaacaatggagtcaagaccatcgccaataaccttaccagcacggtccaggtcttcacggactcagactatcagctcccgtacgtgctcgggtcggctcacgagggctgcctcccgccgttcccagcggacgttttcatgattcctcagtacgggtatctgacgcttaatgatggaagccaggccgtgggtcgttcgtccttttactgcctggaatatttcccgtcgcaaatgctaagaacgggtaacaacttccagttcagctacgagtttgagaacgtacctttccatagcagctacgctcacagccaaagcctggaccgactaatgaatccactcatcgaccaatacttgtactatctctcaaagactattaacggttctggacagaatcaacaaacgctaaaattcagtgtggccggacccagcaacatggctgtccagggaagaaactacatacctggacccagctaccgacaacaacgtgtctcaaccactgtgactcaaaacaacaacagcgaatttgcttggcctggagcttcttcttgggctctcaatggacgtaatagcttgatgaatcctggacctgctatggccagccacaaagaaggagaggaccgtttctttcctttgtctggatctttaatttttggcaaacaaggaactggaagagacaacgtggatgcggacaaagtcatgataaccaacgaagaagaaattaaaactactaacccggtagcaacggagtcctatggacaagtggccacaaaccaccagagtgcccaagcacaggcgcagaccggctgggttcaaaaccaaggaatacttccgggtatggtttggcaggacagagatgtgtacctgcaaggacccatttgggccaaaattcctcacacggacggcaactttcacccttctccgctgatgggagggtttggaatgaagcacccgcctcctcagatcctcatcaaaaacacacctgtacctgcggatcctccaacggccttcaacaaggacaagctgaactctttcatcacccagtattctactggccaagtcagcgtggagatcgagtgggagctgcagaaggaaaacagcaagcgctggaacccggagatccagtacacttccaactattacaagtctaataatgttgaatttgctgttaatactgaaggtgtatatagtgaaccccgccccattggcaccagatacctgactcgtaatctg

SEQ ID NO: 634 - DNA, 2208 bp, Artificial Sequence
  source: /note="Description of Artificial Sequence: Synthetic polynucleotide"
atggctgccgatggttatcttccagattggctcgaggacaaccttagtgaaggaattcgcgagtggtgggctttgaaacctggagcccctcaacccaaggcaaatcaacaacatcaagacaacgctcgaggtcttgtgcttccgggttacaaataccttggacccggcaacggactcgacaagggggagccggtcaacgcagcagacgcggcagccctcgagcacgacaaggcctacgaccagcagctcaaggccggagacaacccgtacctcaagtacaaccacgccgacgccgagttccaggagcggctcaaagaagatacgtcttttgggggcaacctcgggcgagcagtcttccaggccaaaaagaggcttcttgaacctcttggtctggttgaggaagcggctaagacggctcctggaaagaagaggcctgtagagcagtctcctcaggaaccggactcctccgcgggtattggcaaatcgggtgcacagcccgctaaaaagagactcaatttcggtcagactggcgacacagagtcagtcccagaccctcaaccaatcggagaacctcccgcagccccctcaggtgtgggatctcttacaatggcttcaggtggtggcgcaccagtggcagacaataacgaaggtgccgatggagtgggtagttcctcgggaaattggcattgcaattcccaatggctgggggacagagtcatcaccaccagcacccgaacctgggccctgcccacctacaacaatcacctctacaagcaaatctccaacagcacatctggaggatcttcaaatgacaacgcctacttcggctacagcaccccctgggggtattttgacttcaacagattccactgccacttctcaccacgtgactggcagcgactcatcaacaacaactggggattccggcctaagcgactcaacttcaagctcttcaacattcaggtcaaagaggttacggacaacaatggagtcaagaccatcgccaataaccttaccagcacggtccaggtcttcacggactcagactatcagctcccgtacgtgctcgggtcggctcacgagggctgcctcccgccgttcccagcggacgttttcatgattcctcagtacgggtatctgacgcttaatgatggaagccaggccgtgggtcgttcgtccttttactgcctggaatatttcccgtcgcaaatgctaagaacgggtaacaacttccagttcagctacgagtttgagaacgtacctttccatagcagctacgctcacagccaaagcctggaccgactaatgaatccactcatcgaccaatacttgtactatctctcaaagactattaacggttctggacagaatcaacaaacgctaaaattcagtgtggccggacccggcaacatggctgtccagggaagaaactacatacctggacccagctaccgacaacaacgtgtctcaaccactgtgactcaaaacaacaacagcgaatttgcttggcctggagcttcttcttgggctctcaatggacgtaatagcttgatgaatcctggacctgctatggccagccacaaagaaggagaggaccgtttctttcctttgtctggatctttaatttttggcaaacaaggaactggaagagacaacgtggatgcggacaaagtcatgataaccaacgaagaagaaattaaaactactaacccggtagcaacggagtcctatggacaagtggccacaaaccaccagagtgcccaagcacaggcgcagaccggctgggttcaaaaccaaggaatacttccgggtatggtttggcaggacagagatgtgtacctgcaaggacccatttgggccaaaattcctcacacggacggcaactttcacccttctccgctgatgggagggtttggaatgaagcacccgcctcctcagatcctcatcaagaacacacctgtacctgcggatcctccaacggccttcaacaaggacaagctgaactctttcatcacccagtattctactggccaagtcagcgtggagatcgagtgggagctgcagaaggaaaacagcaagcgctggaacccggagatccagtacacttccaactattacaagtctaataatgttgaatttgctgttaatactgaaggtgtatatagtgaaccccgccccattggcaccagatacctgactcgtaatctg

SEQ ID NO: 635 - DNA, 2208 bp, Artificial Sequence
  source: /note="Description of Artificial Sequence: Synthetic polynucleotide"
atggctgccgatggttatcttccagattggctcgaggacaaccttagtgaaggaattcgcgagtggtgggctttgaaacctggagcccctcaacccaaggcaaatcaacaacatcaagacaacgctcgaggtcttgtgcttccgggttacagataccttggacccggcaacggactcgacaagggggagccggtcaacgcagcagacgcggcggccctcgagcacgacaaggcctacgaccagcagctcaaggccggagacaacccgtacctcaagtacaaccacgccgacgccgagttccaggagcggctcaaagaagatacgtcttttgggggtaacctcgggcgagcagtcttccaggccaaaaagaggcttcttgaacctcttggtctggttgaggaagcggctaagacggctcctggaaagaagaggcctgtagagcagtctcctcaggaaccggactcctccgcgggtatcggcaaatcgggtgcacagcccgctaaaaagagactcaatttcggtcagactggcgacacagagtcagtcccagaccctcaaccaatcggagaacctcccgcagccccctcaggtgtgggatctcttacaatggcttcaggtggtggcgcaccagtggcagacaataacgaaggtgccgatggagtgggtagttcctcgggaaattggcattgcgattcccaatggctgggggacagagtcatcaccaccagcacccgaacctgggccctgcccacctacaacaatcacctctacaagcaaatctccaacagcacatctggaggatcttcaaatgacaacgcctacttcggctacagcaccccctgggggtattttgacttcaacagattccactgccacttctcaccacgtgactggcagcgactcatcaacaacaactggggattccggcctaagcgactcaacttcaagctcttcaacattcaggtcaaagaggttacggacaacaatggagtcaagaccgtcgccaataaccttaccagcacggtccaggtcttcacggactcagactatcagctcccgtacgtgctcgggtcggctcacgagggctgcctcccgccgttcccagcggacgttttcatgattcctcagtacgggtatctgacgcttaatgatggaagccaggccgtgggtcgttcgtccttttactgcctggaatatttcccgtcgcaaatgctaagaacgggtaacaacttccagttcagctacgagtttgagaacgtacctttccatagcagctacgctcacagccaaagcctggaccgactaatgaatccactcatcgaccaatacttgtactatctctcaaagactattaacggttctggacagaatcaacaaacgctaaaattcagtgtggccggacccagcaacatggctgtccagggaagaaactacatacctggacccagctaccgacaacaacgtgtctcaaccactgtgactcaaaacaacaacagcgaatttgcttggcctggagcttcttcttgggctctcaatggacgtaatagcttgatgaatcctggacctgctatggccagccacaaagaaggagaggaccgtttctttcctttgtctggatctttaatttttggcaaacaaggaactggaagagacaacgtggatgcggacaaagtcatgataaccaacgaagaagaaattaaaactactaacccggtagcaacggagtcctatggacaagtggccacaaaccaccagagtgcccaagcacaggcgcagaccggctgggttcaaaaccaaggaatacttccgggtatggtttggcaggacagagatgtgtacctgcaaggacccatttgggccaaaattcctcacacggacggcaactttcacccttctccgctgatgggagggtttggaatgaagcacccgcctcctcagatcctcatcaaaaacacacctgtacctgcggatcctccaacggccttcaacaaggacaagctgaactctttcatcacccagtattctactggccaagtcagcgtggagatcgagtgggagctgcagaaggaaaacagcaagcgctggaacccggagatccagtacacttccaactattacaagtctaataatgttgaatttgctgttaatactgaaggtgtatatagtggaccccgccccattggcaccagatacctgactcgtaatctg

SEQ ID NO: 636 - DNA, 2208 bp, Artificial Sequence
  source: /note="Description of Artificial Sequence: Synthetic polynucleotide"
atggctgccgatggttatcttccagattggctcgaggacaaccttagtgaaggaattcgcgagtggtgggctttgaaacctggagcccctcaacccaaggcaaatcaacaacatcaagacaacgctcgaggtcttgtgcttccgggttacaaataccttggacccggcaacggactcgacaagggggagccggtcaacgcagcagacgcggcggccctcgagcacgacaaggcctacgaccagcagctcaaggccggagacaacccgtacctcaagtacaaccacgccgacgccgagttccaggagcggctcaaagaagatacgtcttttgggggcaacctcgggcgagcagtcttccaggccaaaaagaggcttcttgaacctcttggtctggttgaggaagcggctaagacggctcctggaaagaagaggcctgtagagcagtctcctcaggaaccggactcctccgcgggtattggcaaatcgggtgcacagcccgctaaaaagagactcaatttcggtcagactggcgacacagagtcagtcccagaccctcaaccaatcggagaacctcccgcagccccctcaggtgtgggatctcttacaatggcttcaggtggtggcgcaccagtggcagacaataacgaaggtgccgatggagtgggtagttcctcgggaaattggcattgcgattcccaatggctgggggacagagtcatcaccaccagcacccgaacctgggccctgcccacctacaacaatcacctctacaagcaaatctccaacagcacatctggaggatcttcaaatgacaacgcctacttcggctacagcaccccctgggggtattttgacttcaacagattccactgccacttctcaccacgtgactggcagcgactcatcaacaacaactggggattccggcctaagcgactcaacttcaagctcttcaacattcaggtcaaagaggttacggacaacaatggagtcaagaccatcgccaataaccttaccagcacggtccaggtcttcacggactcagactatcagctcccgtacgtgctcgggtcggctcacgagggctgcctcccgccgttcccagcggacgttttcatgattcctcagtacgggtatctgacgcttaatgatggaagccaggccgtgggtcgttcgtccttttactgcctggaatatttcccgtcgcaaatgctaagaacgggtaacaacttccagttcagctacgagtttgagaacgtacctttccatagcagctacgctcacagccaaagcctggaccgactaatgaatccactcatcgaccaatacttgtactatctctcaaagactattaacggttctggacagaatcaacaaacgctaaaattcagtgtggccggacccagcaacatggctgtccagggaagaaactacatacctggacccagctaccgacaacaacgtgtctcaaccactgtgactcaaaacaacaacagcgaatttgcttggcctggagcttcttcttgggctctcaatggacgtaatagcttgatgaatcctggacctgctatggccagccacaaagaaggagaggaccgtttctttcctttgtctggatctttaatttttggcaaacaaggaactggaagagacaacgtggatgcggacaaagtcatgataaccaacgaagaagaaattaaaactactaacccggtagcaacggagtcctatggacaagtggccacaaaccaccagagtgcccaagcacaggcgcagaccggctgggttcaaaaccaaggaatacttccgggtatggtttggcaggacagagatgtgtacctgcaaggacccatttgggccaaaattcctcacacggacggcaactttcacccttctccgctgatgggagggtttggaatgaagcacccgcctcctcagatcctcatcaaaaacacacctgtacctgcggatcctccaacggccttcaacaaggacaagctgaactctttcatcacccagtattctactggccaagtcagcgtggagatcgagtgggagctgcagaaggaaaacagcaagcgctggaacccggagatccagtacacttccaactattacaagtctaataatgttgaatttgctgttaatactgaaggtgtatatagtgaaccccgccccattggcaccagatacctgactcgtaatctg

SEQ ID NO: 637 - DNA, 2208 bp, Artificial Sequence
  source: /note="Description of Artificial Sequence: Synthetic polynucleotide"
atggctgccgatggttatcttccagattggctcgaggacaaccttagtgaaggaattcgcgagtggtgggctttgaaacctggagcccctcaacccaaggcaaatcaacaacgtcaagacaacgctcgaggtcttgtgcttccgggttacaaataccttggacccggcaacggactcgacaagggggagccggtcaacgcagcagacgcggcggccctcgagcacgacaaggcctacgaccagcagctcaaggccggaggcaacccgtgcctcaagtacaaccacgccgacgccgagttccaggagcggctcaaagaagatacgtcttttgggggcaacctcgggcgagcagtcttccaggccaaaaagaggcttcttgaacctcttggtctggttgaggaagcggctaagacggctcctggaaagaagaggcctgtagagcagtctcctcaggaaccggactcctccgcgggtattggcagatcgggtgcacagcccgctaaaaagagactcaatttcggtcagactggcgacacagagtcagtcccagaccctcaaccaatcggagaacctcccgcagccccctcaggtgtgggatctcttacaatggcttcaggtggtggcgcaccagtggcagacaataacgaaggtgccgatggagtgggtagttcctcgggaaattggcattgcgattcccaatggctgggggacagagtcatcaccaccagcacccgaacctgggccctgcccacctacaacaatcacctctacaagcaaatctccaacagcacatctggaggatcttcaaatgacaacgcctacttcggctacagcaccccctgggggtattttgacttcaacagattccactgccacttctcaccacgtgactggcagcgactcatcaacaacaactggggattccggcctaagcgactcaacttcaagctcttcaacattcaggtcaaagaggttacggacaacaatggagtcaaggccatcgccaataaccttaccagcacggtccaggtcttcacggactcagactatcagctcccgtacgtgctcgggtcggctcacgagggctgcctcccgccgttcccagcggacgttttcatgattcctcagtacgggtatctgacgcttaatgatggaagccaggccgtgggtcgttcgtccttttactgcctggaatatttcccgtcgcaaatgctaagaacgggtaacaacttccagttcagctacgagtttgagaacgtacctttccatagcagctacgctcacagccaaagcctggaccgactaatgaatccactcatcgaccaatacttgtactatctctcaaagactattgacggttctggacagaatcaacaaacgctaaaattcagtgtggccggacccagcaacatggctgtccagggaagaaactacatacctggacccagctaccgacaacaacgtgtctcaaccactgtgactcaaaacaacaacagcgaatttgcttggcctggagcttcttcttgggctctcaatggacgtaatagcttgatggatcctggacctgctatggccagccacaaagaaggagaggaccgtttctttcctttgtctggatctttaatttttggcaaacaaggaactggaagagacaacgtggatgcggacaaagtcatgataaccaacgaagaagaaattaaaactactaacccggtagcaacggagtcctatggacaagtggccacaaaccaccagagtgcccaagcacaggcgcagaccggctgggttcaaaaccaaggaatacttccgggtatggtttggcaggacagagatgtgtacctgcaaggacccatttgggccaaaattcctcacacgggcggcaactttcacccttctccgctgatgggagggtttggaatgaagcacccgcctcctcagatcctcatcaaaaacacacctgtacctgcggatcctccaacggccttcaacaaggacaagctgaactctttcatcacccagtattctactggccaagtcagcgtggagatcgagtgggagctgcagaaggaaaacagcaagcgctggaacccggagatccagtacacttccaactattacaagtctaataatgttgaatttgctgttaatactgaaggtgtatatagtgaaccccgccccattggcaccagatacctgactcgtaatctg

SEQ ID NO: 638 - DNA, 2208 bp, Artificial Sequence
  source: /note="Description of Artificial Sequence: Synthetic polynucleotide"
atggctgccgatggttatcttccagattggctcgaggacaaccttagtgaaggaattcgcgagtggtgggctttgaaacctggagcccctcaacccaaggcaaatcaacaacatcaagacaacgctcgaggtcttgtgcttccgggttacaaataccttggacccggcaacggactcgacaagggggagccggtcaacgcagcagacgcggcggccctcgagcacgacaaggcctacgaccagcagctcaaggccggagacaacccgtacctcaagtacaaccacgccgacgccgagttccaggagcggctcaaagaagatacgtcttttgggggcaacctcgggcgagcagtcttccaggccaaaaagaggcttcttgaacctcttggtctggttgaggaagcggctaagacggctcctggaaagaagaggcctgtagagcagtctcctcaggaaccggactcctccgcgggtattggcaaatcgggtgcacagcccgctaaaaagagactcaatttcggtcagactggcgacacagagtcagtcccagaccctcaaccaatcggagaacctcccgcagccccctcaggtgtgggatctcttacaatggcttcaggtggtggcgcaccagtggcagacaataacgaaggtgccgatggagtgggtagttcctcgggaaattggcattgcgattcccaatggctgggggacagagtcatcaccaccagcacccgaacctgggccctgcccacctacaacaatcacctctacaagcaaatctccaacagcacatctggaggatcttcaaatgacaacgcctacttcggctacagcaccccctgggggtattttgacttcaacagattccactgccacttctcaccacgtgactggcagcgactcatcaacaacaactggggattccggcctaagcgactcaacttcaagctcttcaacattcaggtcaaagaggttacggacaacaatggagtcaagaccatcgccaataaccttaccagcacggtccaggtcttcacggactcagactatcagctcccgtacgtgctcgggtcggctcacgagggctgcctcccgccgttcccagcggacgttttcatgattcctcagtacgggtatctgacgcttaatgatggaagccaggccgtgggtcgttcgtccttttactgcctggaatatttcccgtcgcaaatgctaagaacgggtaacaacttccagttcagctacgagtttgagaacgtacctttccatagcagctacgctcacagccaaagcctggaccgactaatgaatccactcatcgaccaatacttgtactatctctcaaagactattaacggttctggacagaatcaacaaacgctaaaattcagtgtggccggacccagcaacatggctgtccagggaagaaactacatacctggacccagctaccgacaacaacgtgtctcaaccactgtgactcaaaacaacaacagcgaatttgcttggcctggagcttcttcttgggctctcaatggacgtaatagcttgatgaatcctggacctgctatggccagccacaaagaaggagaggaccgtttctttcctttgtctggatctttaatttttggcaaacaaggaactggaagagacaacgtggatgcggacaaagtcatgataaccaacgaagaagaaattaaaactactaacccggtagcaacggagtcctatggacaagtggccacaaaccaccagagtgcccaagcacaggcgcagaccggctgggttcaaaaccaaggaatacttccgggtatggtttggcaggacagagatgtgtacctgcaaggacccatttgggccaaaattcctcacacggacggcaactttcacccttctccgctgatgggagggtttggaatgaagcacccgcctcctcagatcctcatcaaaaacacacctgtacctgcggatcctccaacggccttcaacaaggacaagctgaactctttcatcacccagtattctactggccaagtcagcgtggagatcgagtgggagctgcagaaggaaaacagcaagcgctggaacccggagatccagtacacttccaactattacaagcctaataatgttgaatttgctgttaatactgaaggtgtatatagtgaaccccgccccattggcaccagatacctgactcgtaatctg

SEQ ID NO: 639 - DNA, 2208 bp, Artificial Sequence
  source: /note="Description of Artificial Sequence: Synthetic polynucleotide"
atggctgccgatggttatcttccagattggctcgaggacaaccttagtgaaggaattcgcgagtggtgggctttgaaacctggagcccctcaacccaaggcaaatcaacaacatcaagacaacgctcgaggtcttgtgcttccgggttacaaataccttggacccggcaacggactcgacaagggggagccggtcaacgcagcagacgcggcggccctcgagcacaacaaggcctacgaccagcagctcaaggccggagacaacccgtacctcaagtgcaaccacgccgacgccgagttccaggagcggctcaaagaagatacgtcttttgggggcaacctcgggcgagcagtcttccaggccaaaaagaggcctcttgaacctcttggtctggttgaggaagcggctaagacggctcctggaaagaagaggcctgtagagcagtctcctcaggaaccggactcctccgcgggtattggcaaatcgggtgcacagcccgctaaaaagagactcaatttcggtcagactggcgacacagagtcagtcccagaccctcaaccaatcggagaacctcccgcagccccctcaggtgtgagatctcttacaatggcttcaggtggtggcgcaccagtggcagacaataacgaaggtgccgatggagtgggtagttcctcgggaaattggcattgcgattcccaatggctgggggacagagtcatcaccaccagcacccgaacctgggccctgcccacctacaacaatcacctctacaagcaaatctccaacagcacatctggaggatcttcaaatgacaacgcctacctcggctacagcaccccctgggggtattttgacttcaacagattccactgccacttctcaccacgtgactggcagcgactcatcaacaacaactggggattccggcctaagcgactcaacttcaagctcttcaacattcaggtcaaagaggttacggacaacaatggagtcaagaccatcgccaataaccttaccagcacggtccaggtcttcacggactcagactatcagctcccgtacgtgctcgggtcggctcacgagggctgcctcccgccgttcccagcggacgttttcatgattcctcagtacgggtatctgacgcttaatgatggaagccaggccgtgggtcgttcgtccttttactgcctggaatatttcccgtcgcaaatgctaagaacgggtaacaacttccagttcagctacgagtttgagaacgtacctttccatagcagctacgctcacagccaaagcctggaccgactaatgaatccactcatcgaccaatacttgtactatctctcaaagactattaacggttctggacagaatcaacaaacgctaaaattcagtgtggccggacccagcaacatggctgtccagggaagaaactacatacctggacccagctaccgacaacaacgtgtctcaaccactgtgactcaaaacaacaacagcgaatttgcttggcctggagcttcttcttgggctctcaatggacgtaatagcttgatgaatcctggacctactatggccagccacaaagaaggagaggaccgtttctttcctttgtctggatctttaatttttggcaaacaaggaactggaagagacaacgtggatgcggacaaagtcatgataaccaacgaagaagaaattaaaactactaacccggtagcaacggagtcctatggacaagtggccacaaaccaccagagtgcccaagcacaggcgcagaccggctgggttcaaaaccaaggaatacttccgggtatggtttggcaggacagagatgtgtacctgcaaggacccatttgggccaaaattcctcacacggacggcaactttcacccttctccgctgatgggagggtttggaatgaagcacccgcctcctcagatcctcatcaaaaacacacctgtacctgcggatcctccaacggccttcaacaaggacaagctgaactctttcatcacccagtattctactggccaagtcagcgtggagatcgagtgggagctgcagaaggaaaacagcaagcgctggaacccggagatccagtacacttccaactattacaagtctaataatgttgaatttgctgttaatactgaaggtgtatatagtgaaccccgccccattggcaccagatacctgactcgtaatctg

SEQ ID NO: 640 - DNA, 2208 bp, Artificial Sequence
  source: /note="Description of Artificial Sequence: Synthetic polynucleotide"
atggctgccgatggttatcttccagattggctcgaggacaaccttagtgaaggaattcgcgagtggtgggctttgaaacctggagcccctcaacccaaggcaaatcaacaacatcaagacaacgctcgaggtcttgtgcttccgggttacaaataccttggacccggcaacggactcgacaagggggagccggtcaacgcagcagacgcggcggccctcgtgcacgacaaggcctacgaccagcagctcaaggccggagacaacccgtacctcaagtgcaaccacgccgacgccgagttccaggagcggctcaaagaagatacgtcttttgggggcaacctcgggcgagcagtcttccaggccaaaaagaggcttcttgaacctcttggtctggttgaggaagcggctaagacggctcctggaaagaagaggcctgtagagcagtctcctcaggaaccggactcctccgcgggtattggcaaatcgggtgcacagcccgctaaaaagagactcaatttcggtcagactggcgacacagagtcagtcccagaccctcaaccaatcggagaacctcccgcagccccctcaggtgtgggatctcttacaatggcttcaggtggtggcgcaccagtggcagacaataacgaaggtgccgatggagtgggtagttcctcgggaaattggcattgcgattcccaatggctgggggacagagtcatcaccaccagcacccgaacctgggccctgcccacctacaacaatcacctctacaagcaaatctccaacagcacatctggaggatcttcaaatgacaacgcctacctcggctacagcaccccctgggggtattttgacttcaacagattccactgccacttctcaccacgtgactggcagcgactcatcaacaacaactggggattccggcctaagcgactcaacttcaagctcttcaacattcaggtcaaagaggttacggacaacaatggagtcaagaccatcgccaataaccttaccagcacggtccaggtcttcacggactcagactatcagctcccgtacgtgctcgggtcggctcacgagggctgcctcccgccgttcccagcggacgttttcacgattcctcagtacgggtatctgacgcttaatgatggaagccaggccgtgggtcgttcgtccttttactgcctggaatatttcccgtcgcaaatgctaagaacgggtaacaacttccagttcagctacgagtttgagaacgtacctttccatagcagctacgctcacagccaaagcctggaccgactaatgaatccactcatcgaccaatacttgtactatctctcaaagactattaacggttctggacagaatcaacaaacgctaaaattcagtgtggccggacccagcaacatggctgtccagggaagaaactacatacctggacccagctaccgacaacaacgtgtctcaaccactgtgactcaaaacaacaacagcgaatttgcttggcctggagcttcttcttgggctctcaatggacgtaatagcttgatgaatcctggacctgctatggccagccacaaagaaggagaggaccgtttctttcctttgtctggatctttaatttttggcaaacaaggaactggaagagacaacgtggatgcggacaaagtcatgataaccaacgaagaagaaattaaaactactaacccggtagcaacggagtcctatggacaagtggccacaaaccaccagagtgcccaagcacaggcgcagaccggctgggttcaaaaccaaggaatacttccgggtatggtttggcaggacagagatgtgtacctgcaaggacccatttgggccaaaattcctcacacggacggcaactttcacccttctccgctgatgggagggtttggaatgaagcacccgcctcctcagatcctcatcaaaaacacacctgtacctgcggatcctccaacggccttcaacaaggacaagctgaactctttcatcacccagtattctactggccaagtcagcgtggagatcgagtgggagctgcagaaggaaaacagcaagcgctggaacccggagatccagtacacttccaactattacaagtctaataatgttgaatttgctgttaatactgaaggtgtatatagtgaaccccgccccattgggccccgatacctgactcgtaatttt

SEQ ID NO: 641 - DNA, 2208 bp, Artificial Sequence
  source: /note="Description of Artificial Sequence: Synthetic polynucleotide"
atggctgccgatggttatcttccagattggctcgaggacaaccttagtgaaggaattcgcgagtggtgggctttgaaacctggagcccctcaacccaaggcaaatcaacaacatcaagacaacgctcgaggtcttgtgcttccgggttacaaataccttggacccggcaacggactcgacaagggggagccggtcaacgcagcagacgcggcggccctcgagcacaacaaggcctacgaccagcagctcaaggccggagacaacccgtacctcaagtgcaaccacgccgacgccgagttccaggagcggctcaaagaagatacgtcttttgggggcaacctcgggcgagcagtcttccaggccaaaaagaggcttcttgaacctcttggtctggttgaggaagcggctaagacggctcctggaaagaagaggcctgtagagcagtctcctcaggaaccggactcctccgcgggtattggcaaatcgggtgcacagcccgctaaaaagagactcaatttcggtcagactggcgacacagagtcagtcccagaccctcaaccaatcggagaacctcccgcagccccctcaggtgtgagatctcttacaatggcttcaggtggtggcgcaccagtggcagacaataacgaaggtgccgatggagtgggtagttcctcgggaaattggcattgcgattcccaatggctgggggacagagtcatcaccaccagcacccgaacctgggccctgcccacctacaacaatcacctctacaagcaaatctccaacagcacatctggaggatcttcaaatgacaacgcctacctcggctacagcaccccctgggggtattttgacttcaacagattccactgccacttctcaccacgtgactggcagcgactcatcaacaacaactggggattccggcctaagcgactcaacttcaagctcttcaacattcaggtcaaagaggttacggacaacaatggagtcaagaccatcgccaataaccttaccagcacggtccaggtcttcacggactcagactatcagctcccgtacgtgctcgggtcggctcacgagggctgcctcccgccgttcccagcggacgttttcatgattcctcagtacgggtatctgacgcttaatgatggaagccaggccgtgggtcgttcgtccttttactgcctggaatatttcccgtcgcaaatgctaagaacgggtaacaacttccagttcagctacgagtttgagaacgtacctttccatagcagctacgctcacagccaaagcctggaccgactaatgaatccactcatcgaccaatacttgtactatctctcaaagactattaacggttctggacagaatcaacaaacgctaaaattcagtgtggccggacccagcaacatggctgtccagggaagaaactacatacctggacccagctaccgacaacaacgtgtctcaaccactgtgactcaaaacaacaacagcgaatttgcttggcctggagcttcttcttgggctctcaatggacgtaatagcttgatgaatcctggacctgctatggccagccacaaagaaggagaggaccgtttctttcctttgtctggatctttaatttttggcaaacaaggaactggaagagacaacgtggatgcggacaaagtcatgataaccaacgaagaagaaattaaaactactaacccggtagcaacggagtcctatggacaagtggccacaaaccaccagagtgcccaagcacaggcgcagaccggctgggttcaaaaccaaggaatacttccgggtatggtttggcaggacagagatgtgtacctgcaaggacccatttgggccaaaattcctcacacggacggcaactttcacccttctccgctgatgggagggtttggaatgaagcacccgcctcctcagatcctcatcaaaaacacacctgtacctgcggatcctccaacggccttcaacaaggacaagctgaactctttcatcacccagtattctactggccaagtcagcgtggagatcgagtgggagctgcagaaggaaaacagcaagcgctggaacccggagatccagtacacttccaactattacaagtctaataatgttgaatttgctgttaatactgaaggtgtatatagtgaaccccgccccattggcaccagatacctgactcgtaatctg

SEQ ID NO: 642 - DNA, 2208 bp, Artificial Sequence
  source: /note="Description of Artificial Sequence: Synthetic polynucleotide"
atggctgccgatggttatcttccagattggctcgaggacaaccttagtgaaggaattcgcgagtggtgggctttgaaacctggagcccctcaacccaaggcaaatcaacaacatcaagacaacgctcgaggtcttgtgcttccgggttacaaataccttggacccggcaacggactcgacaagggggagccggtcaacgcagcagacgcggcggccctcgagcacgacaaggcctacgaccagcagctcaaggccggagacaacccgtacctcaagtgcaaccacgccgacgccgagttccaggagcggctcaaagaagatacgtcttttgggggcaacctcgggcgagcagtcttccaggccaaaaagaggcttcttgaacctcttggtctggttgaggaagcggctaagacggctcctggaaagaagaggcctgtagagcagtctcctcaggaaccggactcctccgcgggtattggcaaatcgggtgcacagcccgctaaaaagagactcaatttcggtcagactggcgacacagagtcagtcccagaccctcaaccaatcggagaacctcccgcagccccctcaggtgtgggatctcttacaatggcttcaggcggtggcgcaccagtggcagacaataacgaaggtgccgatggagtgggtagttcctcgggaaattggcattgcgattcccaatggctgggggacagagtcatcaccaccagcacccgaacctgggccctgcccacctacaacaatcacctctacaagcaaatctccaacagcacatctggaggatcttcaaatgacaacgcctacctcggctacagcaccccctgggggtattttgacttcaacagattccactgccacttctcaccacgtgactggcagcgactcatcaacaacaactggggattccggcctaagcgactcaacttcgagctcttcaacattcaggtcaaagaggttacggacaacaatggagtcaagaccatcgccaataaccttaccagcacggtccaggtcttcacggactcagactatcagctcccgtacgtgctcgggtcggctcacgagggctgcctcccgccgttcccagcggacgttttcatgattcctcagtacgggtatctgacgcttaatgatggaagccaggccgtgggtcgttcgtccttttactgcctggaatatttcccgtcgcaaatgctaagaacgggtaacaacttccagtccagctacgagtttgagaacgtacctttccatagcagctacgctcacagccaaagcctggaccgactaatgaatccactcatcgaccaatacttgtactatctctcaaagactattaacggttctggacagaatcaacaaacgctaaaattcagtgtggccggacccagcaacatggctgtccagggaagaaactacatacctggacccagctaccgacaacaacgtgcctcaaccactgtgactcaaaacaacaacagcgaatttgcttggcctggagcttcttcttgggctctcaatggacgtaatagcttgatgaatcctggacctgctatggccagccacaaagaaggggaggaccgtttctttcctttgtctggatctttaatttttggcaaacaaggaactggaagagacaacgtggatgcggacaaagtcatgataaccaacgaagaagaaattaaaactactaacccggtagcaacggagtcctatggacaagtggccacaaaccaccagagtgcccaagcacaggcgcagaccggctgggttcaaaaccaaggaatacttccgggtatggtttggcaggacagagatgtgtacctgcaaggacccatttgggccaaaattcctcacacggacggcaactttcacccttctccgctgatgggagggtttggaatgaagcacccgcctcctcagatcctcatcaaaaacacacctgtacctgcggatcctccaacggccttcaacaaggacaagctgaactctttcatcacccagtattctactggccaagtcagcgtggagatcgagtgggagctgcagaaggaaaacagcaagcgctggaacccggagatccagtacacttccaactattacaagtctaataatgttgaatttgctgttaatactgaaggtgtatatagtgaaccccgccccattggcaccagatacctgactcgtaatctg

SEQ ID NO: 643 - DNA, 2208 bp, Artificial Sequence
  source: /note="Description of Artificial Sequence: Synthetic polynucleotide"
atggctgccgatggttatcttccagattggctcgaggacaaccttagtgaaggaattcgcgagtggtgggctttgaaacctggagcccctcaacccaaggcaaatcaacaacatcaagacaacgctcgaggtcttgtgcttccgggttacaaataccttggacccggcaacggactcgacaagggggagccggtcaacgcagcagacgcggcggccctcgagcacgacaaggcctacgaccagcagctcaaggccggagacaacccgtacctcaagtgcaaccacgccgacgccgagttccaggagcggctcaaagaagatacgtcttttgggggcaacctcgggcgagcagtcttccaggccaaaaagaggcttcttgaacctcttggtctggttgaggaagcggctaagacggctcctggaaagaagaggcctgtagagcagtctcctcaggaaccggactcctccgcgggtattggcaaatcgggtgcacagcccgctaaaaagagactcaatttcggtcagactggcgacacagagtcagtcccagaccctcaaccaatcggagaacctcccgcagcccccccaggtgtgggatctcttacaatggcttcaggtggtggcgcaccagtggcggacaataacgaaggtgccgatggagtgggtagttcctcgggaaattggcattgcgattcccaatggctgggggacagagtcatcaccaccagcacccgaacctgggccctgcccacctacaacaatcacctctacaagcaaatctccaacagcacatctggaggatcttcaaatgacaacgcctacctcggctacagcaccccctgggggtattttgacttcaacagattccactgccacttctcaccacgtgactggcagcgactcatcaacaacaactggggattccggcctaagcgactcaacttcaagctcttcaacattcaggtcaaagaggttacggacaacaatggagtcaagaccatcgccaataaccttaccagcacggtccaggtcttcacggactcagactatcagctcccgtacgtgctcgggtcggctcacgagggctgcctcccgccgttcccagcggacgttttcatgattcctcagtacgggtatctgacgcttaatgatggaagccaggccgtgggtcgttcgtccttttactgcctggaatatttcccgtcgcaaatgctaagaacgggtaacaacttccagttcagctacgagtttgagaacgtacctttccatagcagctacgctcacagccaaagcctggaccgactaatgaatccactcatcgaccaatacttgtactatctctcaaagactattagcggttctggacagaatcaacaaacgctaaaattcagtgtggccggacccagcaacatggctgtccagggaagaaactacatacctggacccagctaccgacaacaacgtgtctcaaccactgtgactcaaaacaacagcagcgaatttgcttggcctggagcttcttcttgggctctcaatggacgtaatagcttgatgaatcctggacctgctatggccagccacaaagaaggagaggaccgtttctttcctttgtctggatctttaatttttggcaaacaaggaactggaagagacaacgtggatgcggacaaagtcatgataaccaacgaagaagaaattaaaactactaacccggtagcaacggagtcctatggacaagtggccacaaaccaccagagtgcccaagcacaggcgcagaccggctgggttcaaaaccaaggaatactttcgggtatggtttggcaggacagagatgtgtacctgcaaggacccatttgggccaaaattcctcacacggacggcaactttcacccttctccgctgatgggagggtttggaatgaagcacccgcctcctcagatcctcatcaaaaacacacctgtacctgcggatcctccaacggccttcaacaaggacaagctgaactctttcatcacccagtattctactggccaagtcagcgtggagatcgagtgggagctgcagaaggaaaacagcaagcgctggaacccggagatccagtacacttccaactattacaagtctaataatgttgaatttgctgttaatactgaaggtgtatatagtgaaccccgccccattggcaccagatacctgactcgtaatctg

SEQ ID NO: 644 - DNA, 2208 bp, Artificial Sequence
  source: /note="Description of Artificial Sequence: Synthetic polynucleotide"
atggctgccgatggttatcttccagattggctcgaggacaaccttagtgaaggaattcgcgagtggtgggctttgaaacctggagcccctcaacccaaggcaaatcaacaacatcaagacaacgctcgaggtcttgtgcttccgggttacaaataccttggacccggcaacggactcgacaagggggagccggtcaacgcagcagacgcggcggccctcgagcacgacaaggcctacgaccagcagctcaaggccggagacaacccgtacctcaagtgcaaccacgccgacgccgagttccaggagcggctcaaagaagatacgtcttttgggggcaacctcgggcgagcagtcttccaggccaaaaagaggcttcttgaacctcttggtctggttgaggaagcggctaagacggctcctggaaagaagaggcctgtagagcagtctcctcaggaaccggactcctccgcgggtattggcaaatcgggtgcacagcccgctaaaaagagactcaatttcggtcagactggcgacacagagtcagtcccagaccctcaaccaatcggagaacctcccgcagccccctcaggtgtgggatctcttacaatggcttcaggtggtggcgcaccagtggcagacaataacgaaggtgccgatggagtgggtagttcctcgggaaattggcattgcgattcccaatggctgggggacagagtcatcaccaccagcacccgaacctgggccctgcccacctacaacaatcacctctacaagcaaatctccaacagcacatctggaggatcttcaaatgacaacgcctacctcggctacagcaccccctgggggtattttgacttcaacagattccactgccacttctcaccacgtgactggcagcgactcatcaacaacaactggggattccggcctaagcgactcaacttcaagctcttcaacattcaggtcaaagaggttacggacaacaatggagtcaagaccatcgccaataaccttaccagcacggtccaggtcttcacggactcagactatcagctcccgtacgtgctcgggtcggctcacgagggctgcctcccgccgttcccagcggacgttttcatgattcctcagtacgggtatctgacgcttaatgatggaagccaggccgtgggtcgttcgtccttttactgcctggaatatttcccgtcgcaaatgctaagaacgggtaacaacttccagttcagctacgagtttgagaacgtacctttccatagcagctacgctcacagccaaagcctggaccgactaatgaatccactcatcgaccaatacttgtactatctctcaaagactattaacggttctggacagaatcaacaaacgctaaaattcagtgtggccggacccagcaacatggctgtccagggaagaaactacatacctggacccagctaccgacaacaacgtgtctcaaccactgtgactcaaaacaacaacagcgaatttgcttggcctggagcttcttcttgggctctcaatggacgtaatagcttgatgaatcctggacctgctatggccagccacaaagaaggagaggaccgtttctttcctttgtctggatctttaatttttggcaaacaaggaactggaagagacaacgtggatgcggacaaagtcatgataaccaacgaagaagaaattaaaactactaacccggtagcaacggagtcctatggacaagtggccacaaaccaccagagtgcccaagcacaggcgcagaccggctgggttcaaaaccaaggaatacttccgggtatggtttggcaggacagagatgtgtacctgcaaggacccatttgggccaaaattcctcacacggacggcaactttcacccttctccgctgatgggagggtttggaatgaagcacccgcctcctcagatcctcatcaaaaacacacctgtacctgcggatcctccaacggccttcaacaaggacaagctgaactctttcatcacccagtattctactggccaagtcagcgtggagatcgagtgggagctgcagaaggaaaacagcaagcgctggaacccggagatccagtacacttccaactattacaagtctaataatgttgaatttgctgttaatactgaaggtgtatatagtgaaccccgccccattggcaccagatacctgactcgtaatctg

SEQ ID NO: 645 - DNA, 2208 bp, Artificial Sequence; identical to SEQ ID NO: 644
  source: /note="Description of Artificial Sequence: Synthetic polynucleotide"

SEQ ID NO: 646 - DNA, 2208 bp, Artificial Sequence
  source: /note="Description of Artificial Sequence: Synthetic polynucleotide"
atggctgccgatggttatcttccagattggctcgaggacaaccttagtgaaggaattcgcgagtggtgggctttgaaacctggagcccctcaacccaaggcaaatcaacaacatcaagacaacgctcgaggtcttgtgcttccgggttacaaataccttggacccggcaacggactcgacaagggggagccggtcaacgcagcagacgcggcggccctcgagcacgacaaggcctacgaccagcagctcaaggccggagacaacccgtacctcaagtgcaaccacgccgacgccgagttccaggagcggctcaaagaagatacgtcttttgggggcaacctcgggcgagcagtcttccaggccaaaaagaggcttcttgaacctcttggtctggttgaggaagcggctaagacggctcctggaaagaagaggcctgtagagcagtctcctcaggaaccggactcctccgcgggtattggcaaatcgggtgcacagcccgctaaaaagagactcaatttcggtcagactggcgacacagagtcagtcccagaccctcaaccaatcggagaacctcccgcagccccctcaggtgtgggatctcttacaatggcttcaggtggtggcgcaccagtggcagacaataacgaaggtgccgatggagtgggtagttcctcgggaaattggcattgcgattcccaatggctgggggacagagtcatcaccaccagcacccgaacctgggccctgcccacctacaacaatcacctctacaagcaaatctccaacagcacatctggaggatcttcaaatgacaacgcctacctcgactacagcaccccctgggggtattttgacttcaacagattccactgccacttctcaccacgtgactggcagcggctcatcaacaacaactggggattccggcctaagcgactcaacttcaagctcttcaacattcaggtcaaagaggttacggacaacaatggagtcaagaccatcgccaataaccttaccagcacggtccaggtcttcacggactcagactatcagctcccgtacgtgctcgggtcggctcacgagggctgcctcccgccgttcccagcggacgttttcatgattcctcagtacgggtatctgacgcttaatgatggaagccaggccgtgggtcgttcgtccttttactgcctggaatatttcccgtcgcaaatgctaagaacgggtaacaacttccagttcagctacgagtttgagaacgtacctttccatagcagctacgctcacagccaaagcctggaccgactaatgaatccactcatcgaccaatacttgtactatctctcaaagactattaacggttctggacagaatcaacaaacgctaaaattcagtgtggccggacccagcaacatggctgtccagggaagaaactacatacctggacccagctaccgacaacaacgtgtctcaaccactgtgactcaaaacaacaacagcgaatttgcttggcctggagcttcttcttgggctctcaatggacgtaatagcttgatgaatcctggacctgctatggccagccacaaagaaggagaggaccgtttctttcctttgtctggatctttaatttttggcaaacaaggaactggaagagacaacgtggatgcggacaaagtcatgataaccaacgaagaagaaattaaaactactaacccggtagcaacggagtcctatggacaagtggccacaaaccaccagagtgcccaagcacaggcgcagaccggctgggttcaaaaccaaggaatacttccgggtatggtttggcagggcagagatgtgtacctgcaaggacccatttgggccaaaattcctcacacggacggcaactttcacccttctccgctgatgggagggtttggaatgaagcacccgcctcctcagatcctcatcaaaaacacacctgtacctgcggatcctccaacggccttcaacaaggacaagctgaactctttcatcacccagtattctactggccaagtcagcgtggagatcgagtgggagctgcagaaggaaaacagcaagcgctggaacccggagatccagtacacttccaactattacaagtctaataatgttgaatttgctgttaatactgaaggtgtatatagtgaaccccgccccattggcaccagatacctgactcgtaatctg

SEQ ID NO: 647 - DNA, 2208 bp, Artificial Sequence; identical to SEQ ID NO: 644
  source: /note="Description of Artificial Sequence: Synthetic polynucleotide"

SEQ ID NO: 648 - DNA, 2208 bp, Artificial Sequence
  source: /note="Description of Artificial Sequence: Synthetic polynucleotide"
atggctgccgatggttatcctccagattggctcgaggacaaccttagtgaaggaattcgcgagtggtgggctttgaaacctggagcccctcaacccaaggcaaatcaacaacatcaagacaacgctcgaggtcttgtgcttccgggttacaaataccttggacccggcaacggactcgacaagggggagccggtcaacgcagcagacgcggcggccctcgagcacgacaaggcctacgaccagcagctcaaggccggggacaacccgcacctcaagtacaaccacgccgacgccgagttccaggagcggctcaaagaagatacgtcttttgggggcaacctcgggcgagcagtcttccaggccaaaaagaggcttcttgaacctcttggtctggttgaggaagcggctaagacggctcctggaaagaagaggcccgtagagcagtctcctcaggaaccggactcctccgcgggtattggcaaatcgggtgcacagcccgctaagaagagactcaatttcggtcagactggcgacactgagtcagtcccagaccctcaaccaatcggagaacctcccgcagccccctcaggtgtgggatctcttacaatggcttcaggtggtggcgcaccagtggcagacaataacgaaggtgccgatggagtgggtagttcctcgggaaattggcattgcgattcccaatggctgggggacagagtcatcaccaccagcacccgaacctgggccctgcccacctacaacaatcacctctacaagcaaatctccaacagcacatctggaggatcttcaaatgacaacgcctacttcggctacagcaccccctgggggtattttgacttcaacagattccactgccacttctcaccacgtgactggcagcgactcatcaacaacaactggggattccggcctaagcgactcaacttcaagctcttcaacattcaggtcaaagaggttacggacaacaatggagtcaagaccatcgccaataaccttaccagcacggtccaggtcttcacggactcagactatcagctcccgtacgtgctcgggtcggctcacgagggctgcctcccgccgttcccagcggacgttttcatgattcctcagtacgggtatctgacgcttaatgatggaagccaggccgtgggtcgttcgtccttttactgcctggaatatttcccgtcgcaaatgctaagaacgggtaacaacttccagttcagctacgagtttgagaacgtacctttccatagcagctacgctcacagccaaagcctggaccgactaatgaatccactcatcgaccaatacttgtactatctctcaaagactattaacggttctggacagaatcaacaaacgctaaaattcagtgtggccggacccagcaacatggctgtccagggaagaaactacatacctggacccagctaccgacaacaacgtgtctcaaccactgtgactcaaaacaacaacagcgaatttgcttggcctggagcttcttcttgggctctcaatggacgtaatagcttgatgaatcctggacctgctatggccagccacaaagaaggagaggaccgtttctttcctttgtctggatctttaatttttggcaaacaaggaactggaagagacaacgtggatgcggacaaagtcatgataaccaacgaagaagaaattaaaactactaacccggtagcaacggagtcctatggacaagtggccacaaaccaccagagtgcccaagcacaggcgcagaccggctgggttcaaaaccaaggaatacttccgggtatggtttggcaggacagagatgtgtacctgcaaggacccatttgggccaaaattcctcacacggacggcaactttcacccttctccgctgatgggagggtttggagtgaagcacccgcctcctcagatcctcatcaaaaacacacctgtacctgcggatcctccaacggccttcaacaaggacaggctgaactctttcatcacccagtattctactggccaagtcagcgtggagatcgagtgggagctgcagaaggaaaacagcaagcgctggaacccggagatccagtacacttccaactattacaagtctaataatgttgaatttgctgttaatactgaaggtgtatatagtgaaccccgccccattggcaccagatacctgactcgtaatctg

SEQ ID NO: 649 - DNA, 2208 bp, Artificial Sequence
  source: /note="Description of Artificial Sequence: Synthetic polynucleotide"
atggctgccgatggttatcttccagattggctcgaggacaaccttagtgaaggaattcgcgagtggtgggctttgaaacctggagcccctcaacccaaggcaaatcaacaacatcaagacaacgctcgaggtcttgtgcttccgggttacaaataccttggacccggcaacggactcgacaagggggagccggtcaacgcagcagacgcggcggccctcgagcacgacaaggcctacgaccagcagctcaaggccggagacaacccgtacctcaagtacaaccacgccgacgccgagttccaggagcggctcaaagaagatacgtcttttgggggcaacctcgggcgagcagtcttccaggccaaaaagaggcttcttgaacctcttggtctggttgaggaagcggctaagacggctcctggaaagaagaggcctgtagagcagtctcctcaggaaccggactcctccgcgggtattggcaaatcgggtgcacagcccgctaaaaagagactcaatttcggtcagactggcgacacagagtcagtcccagaccctcaaccaatcggagaacctcccgcagccccctcaggtgtgggatctcttacaatggcttcaggtggtggcgcaccagtggcggacaataacgaaggtgccgatggagtgggtagttcctcgggaaattggcattgcgattcccaatggctgggggacagagtcatcaccaccagcacccgaacctgggccctgcccacctacaacaatcacctctacaagcaaatctccaacagcacatctggaggatcttcaaatgacaacgcctacttcggctacagcaccccctgggggtattttgacttcaacagattccactgccacttctcaccacgtgactggcagcgactcatcaacaacaactggggattccggcctaagcgactcaacttcaagctcttcaacattcaggtcaaagaggttacggacaacaatggagtcaagaccatcgccaataaccttaccagcacggtccaggtcttcacggactcagactatcagctcccgtacgtgctcgggtcggctcacgagggctgcctcccgccgttcccagcggacgttttcatgattcctcagtacgggtatctgacgcttaatgatggaagccaggccgtgggtcgttcgtccttttactgcctggaatatttcccgtcgcaaatgctaagaacgggtaacaacttccagttcagctacgagtttgagaacgtacctttccatagcagctacgctcacagccaaagcctggaccgactaatgaatccactcatcgaccaatacttgtactatctctcaaagactattaacggttctggacagaatcaacaaacgctaaaattcagtgtggccggacccagcaacatggctgtccagggaagaaactacatacctggacccagctaccgacaacaacgtgtctcaaccactgtgactcaaaacaacaacagcgaatttgcttggcctggagcttcttcttgggctctcaatggacgtaatagtttgatgaatcctggacctgctatggccagccacaaagaaggagaggaccgtttctttcctttgtctggatctttaatttttggcaaacaaggaactggaagagacaacgtggatgcggacaaagtcatgataaccaacgaagaagaaattaaaactactaacccggtagcaacggagtcctatggacaagtggccacaaaccaccagagtgcccaagcacaggcgcagaccggctgggttcaaaaccaaggaatacttccgggtatggtttggcaggacagagatgtgtacctgcaaggacccatttgggccaaaattcctcacacggacggcaactttcacccttctccgctgatgggagggtttggagtgaagcacccgcctcctcagatcctcatcaaaaacacacctgtacctgcggatcctccaacggccttcaacaaggacaagctgaactctttcatcacccagtattctactggccaagtcagcgtggagatcgagtgggagctgcagaaggaaaacagcaagcgctggaacccggagatccagtacacttccaactattacaagtctaataatgttgaatttgctgttaatactgaaggtgtatatagtgaaccccgccccattggcaccagatacctgactcgtaatctg

SEQ ID NO: 650 - DNA, 2208 bp, Artificial Sequence
  source: /note="Description of Artificial Sequence: Synthetic polynucleotide"
atggctgccgatggttatcttccagattggctcgaggacaaccttagtgaaggaattcgcgagtggtgggctttgaaacctggagcccctcaacccaaggcaaatcaacaacatcaagacaacgctcgaggtcttgtgcttccgggttacaaataccttggacccggcaacggactcgacaagggggagccggtcaacgcagcagacgcggcggccctcgagcacgacaaggcctacgaccagcagctcaaggccggagacaacccgtacctcaagtacaaccacgccgacgccgagttccaggagcggctcaaagaagatacgtcttttgggggcaacctcgggcgagcagtcttccaggccaaaaagaggcttcttgaacctcttggtctggttgaggaagcggctaagacggctcctggaaagaagaggcctgtagagcagtctcctcaggaaccggactcctccgcgggtattggcaaatcgggtgcacagcccgctaaaaagagactcaatttcggtcagactggcgacacagagtcagtcccagaccctcaaccaatcggagaacctcccgcagccccctcaggtgtgggatctcttacaatggcttcaggtggtggcgcaccagtggcagacaataacgaaggtgccgatggagtgggtagttcctcgggaaattggcattgcgattcccaatggctgggggacagagtcatcaccaccagcacccgaacctgggccctgcccacttacaacaatcacctctacaagcaaatctccaacagcacatctggaggatcttcaaatgacaacgcctacttcggctacagcaccccctgggggtattttgacttcaacagattccactgccacttctcaccacgtgactggcagcgactcaccaacaacaactggggattccggcctaagcgactcaacttcaagctcttcaacattcaggtcaaagaggttacggacaacaatggagtcaagaccatcgccaataaccttaccagcacggtccaggtcttcacggactcagactatcagctcccgtacgtgctcgggtcggctcacgagggctgcctcccgccgttcccagcggacgttttcatgattcctcagtacgggtatctgacgcttaatgatggaagccaggccgtgggtcgttcgtccttttactgcctggaatatatcccgtcgcaaatgctaagaacgggtaacaacttccagttcagctacgagtttgagaacgtacctttccatagcagctacgctcacagccaaagcctggaccgactaatgaatccactcatcgaccaatacttgtactatctctcaaagactattaacggttctggacagaatcaacaaacgctaaaattcagtgtggccggacccagcaacatggctgtccagggaagaaactacatacctggacccagctaccgacaacaacgtgtctcaaccactgtgactcaaaacaacaacagcgaatttgcttggcctggagcttcttcttgggctctcaatggacgtaatagcttgatgaatcctggacctgctatggccagccacaaagaaggagaggaccgtttctttcctttgtctggatctttaatttttggcaaacaaggaactggaagagacaacgtggatgcggacaaagtcatgataaccaacgaagaagaaattaaaactactaacccggtagcaacggagtcctatggacaagtggccacaaaccaccagagtgcccaagcacaggcgcagaccggctgggttcaaaaccaaggaatacttccgggtatggtttggcaggacagagatgtgtacctgcaaggacccatttgggccaaaattcctcacacggacggcaactttcacccttctccgctgatgggagggtttggagtgaagcacccgcctcctcagatcctcatcaaaaacacacctgtacctgcggatcctccaacggccttcaacaaggacaagctgaactctttcatcacccagtattctactggccaagtcagcgtggagatcgagtgggagctgcagaaggaaaacagcaagcgctggaacccggagatccagtacacttccaactattacaagtctaataatgttgaatttgctgttaatactgaaggtgtatatagtgaaccccgccccattggcaccagatacctgactcgtaatctg

SEQ ID NO: 651 - DNA, 2208 bp, Artificial Sequence
  source: /note="Description of Artificial Sequence: Synthetic polynucleotide"
atggctgccgatggttatcttccagattggctcgaggacaaccttagtgaaggaattcgcgagtggtgggctttgaaacctggagcccctcaacccaaggcaaatcaacaacatcaagacaacgctcgaggtcttgtgcttccgggttacaaataccttggacccggcaacggactcgacaagggggagccggtcaacgcagcagacgcggcggccctcgagcacgacaaggcctacgaccagcagctcaaggccggagacaacccgtacctcaagtacaaccacgccgacgccgagttccaggagcggctcaaagaagatacgtcttttgggggcaacctcgggcgagcagtcttccaggccaaaaagaggcttcttgaacctcttggtctggttgaggaagcggctaagacggctcctggaaagaagaggcctgtagagcagtctcctcaggaaccggactcctccgcgggtattggcaaatcgggtgcacagcccgctaaaaagagactcaatttcggtcagactggcgacacagagtcagtcccagaccctcaaccaatcggagaacctcccgcagccccctcaggtgtgggatctcttacaatggcttcaggtggtggcgcaccagtggcagacaataacgaaggtgccgatggagtgggtagttcctcgggaaattggcattgcgattcccaatggctgggggacagagtcatcaccaccagcacccgaacctgggccctgcccacctacaacaatcacctctacaagcaaatctccaacagcacatctggaggatcttcaaatgacaacgcctacttcggctacagcaccccctgggggtattttgacttcaacagattccactgccacttctcaccacgtgactggcagcgactcatcaacaacaactggggattccggcctaagcgactcaacttcaagctcttcaacattcaggtcaaagaggttacggacaacaatggagtcaagaccatcgccaataaccttaccagcacggtccaggtcttcacggactcagactatcagctcccgtacgtgctcgggtcggctcacgagggctgcctcccgccgttcccagcggacgttttcatgattcctcagtacgggtatctgacgcttaatgatggaagccaggccgtgggtcgttcgtccttttactgcctggaatatttcccgtcgcaaatgctaagaacgggtaacaacttccagtttagctacgagtttgagaacgtacctttccatagcagctacgctcacagccaaagcctggaccgactaatgaatccactcatcgaccaatacttgtactatctctcaaagactattaacggttctggacagaatcaacaaacgctaaaattcagtgtggccggacccagcaacatggctgtccagggaagaaactacatacctggacccagctaccgacaacaacgtgtctcaaccactgtgactcaaaacaacaacagcgaatttgcttggcctggagcttcttcttgggctctcaatggacgtaatagcttgatgaatcctggacctgctatggccagccacaaagaaggagaggaccgtttctttcctttgtctggatctttaatttctggcaaacaaggaactggaagagacaacgtggatgcgaacaaagtcatgataaccaacgaagaagaaattaaaactactaacccggtagcaacggagtcctatggacaagtggccacaaaccaccagagtgcccaagcacaggcgcagaccggctgggttcaaaaccaaggaatacttccgggtatggtttggcaggacagagatgtgtacctgcaaggacccatttgggccaaaattcctcacacggacggcaactttcacccttctccgctgatgggagggtttgaaatgaagcacccgcctcctcagatcctcatcaaaaacacacctgtacctgcggatcctccaacggccttcaacaaggacaagctgaactctttcatcacccagtattctactggccaagtcagcgtggagatcgagtgggagctgcagaaggaaaacagcaagcgctggaacccggagatccagtacacttccaactattacaagtctaataatgttgaatttgctgttaatactgaaggtgtatatagtgaaccccgccccattggcaccagatacctgactcgtaatctg

SEQ ID NO: 652 - DNA, 2208 bp, Artificial Sequence
  source: /note="Description of Artificial Sequence: Synthetic polynucleotide"
atggctgccgatggttatcttccagattggctcgaggacaaccttagtgaaggaattcgcgagtggtgggctttgaaacctggagcccctcaacccaaggcaaatcaacaacatcaagacaacgctcgaggtcttgtgcttccgggttacaaataccttggacccggcaacggactcgacaagggggagccggtcaacgcagcagacgcggcggccctcgagcacgacaaggcctacgaccagcagctcaaggccggagacaacccgtacctcaagtacaaccacgccgacgccgagttccaggagcggctcaaagaagatacgtcttttgggggcaacctcgggcgagcagtcttccaggccaaaaagaggcttcttgaacctcttggtctggttgaggaagcggctaagacggctcctggaaagaagaggcctgtagagcagtctcctcaggaaccggactcctccgcgggtattggcaaatcgggtgcacagcccgctaaaaagagactcaatttcggtcagactggcgacacagagtcagtcccagaccctcaaccaatcggagaacctcccgcagccccctcaggtgtgggatctcttacaatagcttcaggtggtggcgcaccagtggcagacaataacgaaggtgccgatggagtgggtagttcctcgggaaattggcattgcgattcccaatggctgggggacagagtcatcaccaccagcacccgaacctgggccctgcccacctacaacaatcacctctacaagcgaatctccaacagcacatctggaggatcttcaaatgacaacgcctacttcggctacagcaccccctgggggtattttgacttcaacagattccactgccacttctcaccacgtgactggcagcgactcatcaacaacaactggggattccggcctaagcgactcaacttcaagcttttcaacattcgggtcaaagaggttacggacaacaatggagtcaagaccatcaccaataaccttaccagcacggtccaggtcttcacggactcagactatcagctcccgtacgtgcttgggtcggctcacgagggctgcctcccgccgttcccagcggacgttttcatgattcctcagtacgggtatctgacgcttaatgatggaagccaggccgtgggtcgttcgtccttttactgcctggaatatttcccgtcgcaaatgctaagaacgggtaacaacttccagttcagctacgagtttgagaacgtacctttccatagcagctacgctcacagccaaagcctggaccgactaatgaatccactcatcgaccaatacttgtactatctctcaaagactattaacggttctggacagaatcaacaaacgctaaaattcagtgtggccggacccagcaacatggctgtccagggaagaaactacatacctggacccagctaccgacaacaacgtgtctcaaccactgtgactcgaaacaacaacagcgaatttgcttggcctggagcttcttcttgggctctcaatggacgtaatagcttgatgaatcctggacctgctatggccagccacaaagaaggagaggaccgtttctttcctttgtctggatctttaatttttggcaaacaaggaactggaagagacaacgtggatgcggacaaagtcatgataaccaacgaagaagaaattaaaactactaacccggtagcaacggagtcctatggacaagtggccacaaaccaccagagtgcccaagcacaggcgcagaccggctgggttcaaaaccaaggaatacttccgggtatggtttggcaggacagagatgtgtacctgcaaggacccatttgggccaaaattcctcacacggacggcaactttcacccttctccgctgatgggagggtttggagtgaagcacccgcctcctcagatcctcatcaaaaacacacctgtacctgcggatcctccaacggccttcaacaaggacaagctgaactctttcatcacccagtattctactggccaagtcagcgtggagatcgagtgggagctgcagaaggaaaacagcaagcgctggaacccggagatccagtacacttccaactattacaagtctaataatgttgaatttgctgttaatactgaaggtgtatatagtgaaccccgccccattggcaccagatacctgactcgtaatctg

SEQ ID NO: 653 - DNA, 2208 bp, Artificial Sequence
  source: /note="Description of Artificial Sequence: Synthetic polynucleotide"
atggctgccgatggttatcttccagattggctcgaggacaaccttagtgaaggaattcgcgagtggtgggctttgaaacctggagcccctcaacccaaggcaaatcaacaacatcaagacaacgctcgaggtcttgtgcttccgggttacaaataccttggacccggcaacggactcgacaagggggagccggtcaacgcagcagacgcggcggccctcgagcacgacaaggcctacgaccagcagctcaaggccggagacaacccgtacctcaagtacaaccacgccgacgccgagttccaggagcggctcaaagaagatacgtcttttgggggcaacctcgggcgagcagtcttccaggccaaaaagaggcttcttgaacctcttggtctggttgaggaagcggctaagacggctcctggaaagaagaggcctgtagagcagtctcctcaggaaccggactcctccgcgggtattggcaaatcgggcgcacagcccgctaaaaagagactcaatttcggtcagactggcgacacagagccagtcccagaccctcaaccaatcggagaacctcccgcagccccctcaggtgtgggatctcttacaatggcttcaggtggtggcgcaccagtggcagacaataacgaaggtgccgatggagtgggtagttcctcgggaaattggcattgcgattcccaatggctgggggacagagtcatcaccaccagcacccgaacctgggccctgcccacctacaacaatcacctctacaagcaaatctccaacagcacatctggaggatcttcaaatgacaacgcctacttcggctacagcaccccctgggggtattttgacttcaacagattccactgccacttctcaccacgtgactggcagcgactcatcaacaacaactggggattccggcctaagcgactcaacttcaagctcttcaacattcaggtcaaagaggttacggacaacaatggagtcaagaccatcgccaataaccttaccagcacggtccaggtcttcacggactcagactatcagctcccgtacgtgctcgggtcggctcacgagggctgcctcccgccgttcccagcgggcgttttcatgattcctcagtacgggtatctgacgcttaatgatggaagccaggccgtgggtcgttcgtccttttactgcctggaatatttcccgtcgcaaatgctaagaacgggtaacaacttccagttcagctacgagtttgagaacgtacctttccatagcagctacgctcacagccaaagcctggaccgactaatgaatccactcatcgaccaatacttgtactatctctcaaagactattaacggttctggacagaatcaacaaacgctaaaattcagtgtggccggacccagcaacatggctgtccagggaagaaactacatacctggacccagctaccgacaacaacgtgtctcaaccactgcgactcaaaacaacaacagcgaatttgcttggcctggagcttcttcttgggctctcaatggacgtaatagcttgatgaatcctggacctgctatggccagccacaaagaaggagaggaccgtttctttcctttgtctggatctttaatttttggcaaacaaggaactggaagagacaacgtggatgcggacaaagtcatgataaccaacgaagaagaaattaaaactactaacccggtagcaacggagtcctatggacaagtggccacaaaccaccagagtgcccaagcacaggcgcagaccggctgggttcaaaaccaaggaatacttccgggtatggtttggcaggacagagatgtgtacctgcaaggacccatttgggccaaaattcctcacacggacggcaactttcacccttctccgctgatgggagggtttggaatgaagcacccgcctcctcagatcctcatcaaaaacacacctgtacctgcggatcctccaacggccttcaacaaggacaagctgaactctttcatcacccagtattctactggccaagtcagcgtggagatcgagtgggagctgcagaaggaaaacagcaagcgctggaacccggagatccagtacacttccaactattacaagtctaataatgttgaatttgctgttaatactgaaggtgtatatagtgaaccccgccccattggcaccagatacctgactcgtaatctg

SEQ ID NO: 654 - DNA, 2208 bp, Artificial Sequence
  source: /note="Description of Artificial Sequence: Synthetic polynucleotide"
atggctgccgatggttatcttccagattggctcgaggacaaccttagtgaaggaattcgcgagtggtgggctttgaaacctggagcccctcaacccaaggcaaatcaacaacatcaagacaacgctcgaggtcttgtgcttccgggttacaaataccttggacccggcaacggactcgacaagggggagccggtcaacgcagcagacgcggcggccctcgagcacgacaaggcctacgaccagcagctcaaggccggagacaacccgtacctcaagtacaaccacgccgacgccgggttccaggagcggctcaaagaagatacgtcttttgggggcaacctcgggcgagcagtcttccaggccaaaaagaggcttcttgaacctcttggtctggttgaggaagcggctaagacggctcctggaaagaagaggcctgtagagcagtctcctcaggaaccggactcctccgcgggtattggcaaatcgggtgcacagcccgctaaaaagagactcaatttcggtcagactggcgacacagagtcagtcccagtccctcaaccaatcggagaacctcccgcagccccctcaggtgtgggatctcttacaatggcttcaggtggtggcgcaccagtggcagacaataacgaaggtgccgatggagtgggtagttcctcgggaaattggcattgcgattcccaatggctgggggacagagtcatcaccaccagcacccgaacctgggccctgcccacctacaacaatcacctctacaagcaaatctccaacagcacatctggaggatcttcaaatgacaacgcctacttcggctacagcaccccctgggggtattttgacttcaacagattccactgccacttctcaccacgtgactggcagcgactcatcaacaacaactggggattccggcctaagcgactcaacttcaagctcttcaacattcaggtcaaagaggttacggacaacaatggagtcaagaccatcgccaataaccttaccagcacggtccaggtcttcacggactcagactatcagctcccgtacgtgctcgggtcggctcacgagggctgcctcccgccgttcccagcggacgttttcatgattcctcagtacgggtatctgacgcttaatgatggaagccaggccgtgggtcgttcgtccttttactgcctggaatatttcccgtcgcaaatgctaagaacgggtaacaacttccagttcagctacgagtttgagaacgtacctttccatagcagctacgctcacagccaaagcctggaccgactaatgaatccactcatcgaccaatacttgtactatctctcaaagactattaacggttctggacagaatcaacaaacgctaaaattcagtgtggccggacccagcaacatggctgtccagggaagaaactacatacctggacccagctaccgacaacaacgtgtctcaaccactgtgactcaaaacaacaacagcgaatttgcttggcctggagcttcttcttgggctctcaatggacgtaatagcttgatgaatcctggacctgctatggccagccacaaagaaggagaggaccgtttctttcctttgtctggatctttaatttttggcaaacaaggagctggaagagacaacgtggatgcggacaaagtcatgataaccaacgaagaagaaattaaaactactaacccggtagcaacggagtcctatggacaagtggccacaaaccaccagagtgcccaagcacaggcgcagaccggctgggttcaaaaccaaggaatacttccgggtatggtttggcaggacagagatgtgtacctgcaaggacccatttgggccaaaattcctcacacggacggcaactttcacccttctccgctgatgggagggtttggaatgaagcacccgcctcctcagatcctcatcaaaaacacacctgtacctgcggatcctccaacggccttcaacaaggacaagctgaactctttcatcacccagtattctactggccaagtcagcgtggagatcgagtgggagctgcagaaggaaaacagcaagcgctggaacccggagatccagtacacttccaactattacaagtctaataatgttgaatttgctgttaatactgaaggtgtatatagtgaaccccgccccattggcaccagatacctgactcgtaatctg

SEQ ID NO: 655 - DNA, 2208 bp, Artificial Sequence
  source: /note="Description of Artificial Sequence: Synthetic polynucleotide"
  modified_base (377)..(377): a, c, t, or g
atggctgccgatggttatcttccagattggctcgaggacaaccttagtgaaggaattcgcgagaggtgggctttgaaacctggagcccctcaacccaaggcaaatcaacaacatcaagacaacgctcgaggtcttgtgcttccgggttacaaataccttggacccggcaacggactcgacaagggggagccggtcaacgcagcagacgcggcggccctcgagcacgacaaggcctacgaccagcagctcaaggccggagacaacccgtacctcaagtacaaccacgccgacgccgagttccaggagcggctcaaagaagatacgtcttttgggggcaacctcgggcgagcagtcttccaggccaaaaagaggcttcntgaacctcttggtctggttgaggaagcggctaagacggctcctggaaagaagaggcctgtagagcagtctcctcaggaaccggactcctccgcgggtattggcaaatcgggtgcacagcccgctaaaaagagactcaatttcggtcagactggcgacacagagtcagtcccagaccctcaaccaatcggagaacctcccgcagccccctcaggtgtgggatctcttacaatggcttcaggtggtggcgcaccagtggcagacaataacgaaggtgccgatggagtgggtagttcctcggggaattggcattgcgattcccaatggctgggggacagagtcatcaccaccagcacccgaacctgggccctgcccacctacaacaatcacctctacaagcaaatctccaacagcacatctggaggatcttcaaatgacaacgcctacttcggctacagcaccccctgggggtattttgacttcaacagattccactgccacttctcaccacgtgactggcagcgactcatcaacaacaactggggattccggcctaagcgactcaacttcaagctcttcaacattcaggtcaaagaggttacggacaacaatggagtcaagaccatcgccaataaccttaccagcacggtccaggtcttcacggactcagactatcagctcccgtacgtgctcgggtcggctcacgagggctgcctcccgccgttcccagcggacgttttcatgattcctcagtacgggtatctgacgcttaatgatggaagccaggccgtgggtcgttcgtccttttactgcctggaatatttcccgtcgcaaatgctaagaacgggtaacaacttccagttcagctacgagtttgagaacgtacctttccatagcagctacgctcacagccaaagcccggaccgactaatgaatccactcatcgaccaatacttgtactatctctcaaagactattaacggttctggacagaatcaacaaacgctaaaattcagtgtggccggacccagcaacatggctgtccagggaagaaactacatacctggacccagctaccgacaacaacgtgtctcaaccactgtgactcaaaacaacaacagcgaatttgcttggcctggagcttcttcttgggctctcaatggacgtaatagcttgatgaatcctggacctgctatggccagccacaaagaaggagaggaccgtttctttcctttgtctggatctttaatttttggcaaacaaggaactggaagagacaacgtggatgcggacaaagtcatgataaccaacgaagaagaaattaaaactactaacccggtagcaacggagtcctatggacaagtggccacaaaccaccagagtgcccaagcacaggcgcagaccggctgggttcaaaaccaaggaatacttccgggtatggtttggcaggacagagatgtgtacctgcaaggacccatttgggccaaaattcctcacacggacggcaactttcacccttctccgctgatgggagggtttggagtgaagcacccgcctcctcagatcctcatcaaaaacacacctgtacctgcggatcctccaacggccttcaacaaggacaagctgaactctttcatcacccagtattctactggccaagtcagcgtggagatcgagtgggagctgcagaaggaaaacagcaagcgctggaacccggagatccagtacacttccaactattacaagtctaataatgttgaatttgctgttaatactgaaggtgtatatagtgaaccccgccccattggcaccagatacctgactcgtaatctg

SEQ ID NO: 656 - DNA, 2208 bp, Artificial Sequence
  source: /note="Description of Artificial Sequence: Synthetic polynucleotide"
atggctgccgatggttatcttccagattggctcgaggacaaccttagtgaaggaattcgcgagtggtgggctttgaaacctggagcccctcaacccaaggcaaatcaacaacatcaagacaacgctcgaggtcttgtgcttccgggttacaaataccttggacccggcaacggactcgacaagggggagccggtcaacgcagcagacgcggcggccctcgagcacgacaaggcctacgaccagcagctcaaggccggagacaacccgtacctcaagtacaaccacgccgacgccgagttccaggagcggctcaaagaagatacgtcttttgggggcaacctcgggcgagcagtcttccaggccaaaaagaggcttcttgaacctcttggtctggttgaggaagcggctaagacggctcctggaaagaagaggcctgtagagcagtctcctcaggaaccggactcctccgcgggtattggcaaatcgggtgcacagcccgctaaaaagagactcaatttcggtcagactggcgacacagagtcagtcccagaccctcaaccaatcggagaacctcccgcagccccctcaggtgtgggatctcttacaatggcttcaggtggtggcgcaccagtggcagacaataacgaaggtgccgatggagtgggtagttcctcgggaaattggcattgcgattcccaatggctgggggacagagtcatcaccaccagcacccgaacctgggccctgcccacctacaacaatcacctctacaagcaaatctccaacagcacatctggaggatcttcaaatgacaacgcctacctcggctacagcaccccctgggggtattttgacttcaacagattccactgccacttctcaccacgtgactggcagcgactcatcaacaacaactggggattccggcctaagcgactcaacttcaagctcttcaacattcaggtcaaagaggttacggacaacaatggagtcaagaccatcgccaataaccttaccagcacggtccaggtcttcacggactcagactatcagctcccgtacgtgctcgggtcggctcacgagggctgcctcccgccgttcccagcggacgttttcatgattcctcagtacgggtatctgacgcttaatgatggaagccaggccgtgggtcgttcgtccttttactgcctggaatatttcccgtcgcaaatgctaagaacgggtaacaacttccagttcagctacgagtttgagaacgtacctttccatagcagctacgctcacagccaaagcctggaccgactaatgaatccactcatcgaccaatacttgtactatctctcaaagactattaacggttctggacagaatcaacaaacgctaaaattcagtgtggccggacccagcaacatggctgtccagggaagaaactacatacctggacccagctaccgacaacaacgtgtctcaaccactgtgactcaaaacaacaacagcgaatttgcttggcctggagcttcttcttgggctctcaatggacgtaatagcttgatgaatcctggacctgctatggccagccacaaagaaggagaggaccgtttctttcctttgtctggatctttaatttttggcaaacaaggaactggaagagacaacgtggatgcggacaaagtcatgataaccaacgaagaagaaattaaaactactaacccggtagcaacggagtcctatggacaagtggccacaaaccaccagagtgcccaagcacaggcgcagaccggctgggttcaaaaccaaggaatacttccgggtatggtttggcaggacagagatgtgtacctgcaaggacccatttgggccaaaattcctcacacggacggcaactttcacccttctccgctgatgggagggtttggaatgaagcacccgcctcctcagatcctcatcaaaaacacacctgtacctgcggatcctccaacggccttcaacaaggacaagctgaactctttcatcacccagtattctactggccaagtcagcgtggagatcgagtgggagctgcagaaggaaaacagcaagcgctggaacccggagatccagtacacttccaactattacaagtctaataatgttgaatttgctgttaatactgaaggtgtatatagtgaaccccgccccattggcaccagatacctgactcgtaatctg

SEQ ID NO: 657 - DNA, 2208 bp, Artificial Sequence
  source: /note="Description of Artificial Sequence: Synthetic polynucleotide"
atggctgccgatggttatcttccagattggctcgaggacaaccttagtgaaggaattcgcgagtggtgggctttgaaacctggagcccctcaacccaaggcaaatcaacaacatcaagacaacgctcgaggtcttgtgcttccgggttacaaataccttggacccggcaacggactcgacaagggggagccggtcaacgcagcagacgcggcggccctcgagcacgacaaggcctacgaccagcagctcaaggccggagacaacccgtacctcaagtacaaccacgccgacgccgagttccaggagcggctcaaagaagatacgtcttttgggggcaacctcgggcgagcagtcttccaggccaaaaagaggcttcttgaacctcttggtctggttgaggaagcggctaagacggctcctggaaagaagaggcctgtagagcagtctcctcaggaaccggactcctccgcgggtattggcaaatcgggtgcacagcccgctaaaaagagactcaatttcggtcagactggcgacacagagtcagtcccagaccctcaaccaatcggagaacctcccgcagccccctcaggtgtgggatctcttacaatggcttcaggtggtggcgcaccagtggcagacaataacgaaggtgccgatggagtgggtagttcctcgggaaattggcattgcgattcccaatggctgggggacagagtcatcaccaccagcacccgaacctgggccctgcccacctacaacaatcacctctacaagcaaatctccaacagcacatctggaggatcttcaaatgacaacgcctacttcggctacagcaccccctgggggtattttgacttcaacagattccactgccacttctcaccacgtgactggcagcgactcatcaacaacaactggggattccggcctaagcgactcaacttcaagctcttcaacattcaggtcaaagaggttacggacaacaatggagtcaagaccatcgccaataaccttaccagcacggtccaggtcttcacggactcagactatcagctcccgtacgtgctcgggtcggctcacgagggctgcctcccgccgttcccagcggacgttttcatgattcctcagtacgggtatctgacgcttaatgatggaagccaggccgtgggtcgttcgtccttttactgcctggaatatttcccgtcgcaaatgctaagaacgggtaacaacttccagttcagctacgagtttgagaacgtacctttccatagcagctacgctcacagccagagcctggaccgactaatgaatccactcatcgaccaatacttgtactatctctcaaagactattaacggttctggacagaatcaacaaacgctaaaattcagtgtggccggacccagcaacatggctgtccagggaagaaactacatacctggacccagctaccgacaacaacgtgtctcaaccactgtgactcaaaacaacaacagcgaatttgcttggcctggagcttcttcttgggctctcaatggacgtaatagcttgatgaatcctggacctgctatggccagccacaaagaaggagaggaccgtttctttcctttgtctggatctttaatttttggcaaacaaggaactggaagagacaacgtggatgcggacaaagtcatgataaccaacgaagaagaaattaaaactactaacccggtagcaacggagtcctatggacaagtggccacaaaccaccagagtgcccaagcacaggcgcagaccggctgggttcaaaaccaaggaatacttccgggtatggtttggcaggacagagatgtgtacctgcaaggacccatttgggccaaaattcctcacacggacggcaactttcacccttctccgctgatgggagggtttggaatgaagcacccgcctcctcagatcctcatcaaaaacacacctgtacctgcggatcctccaacggccttcaacaaggacaagctggactctttcatcacccagtattctactggccaagtcagcgtggagatcgagtgggagctgcagaaggaaaacagcaagcgctggaacccggtgatccagtacacttccaactattacaagtctaataatgttgaatttgctgttaatactgaaggtgtatatagtgaaccccgccccattggcaccagatacctgactcgtaatctg

SEQ ID NO: 658 - DNA, 2208 bp, Artificial Sequence
  source: /note="Description of Artificial Sequence: Synthetic polynucleotide"
atggctgccgatggttatcttccagattggctcgaggacaacctctctgagggcattcgcgagtggtgggacttgaaacctggagccccgaagcccaaagccaaccagcaaaagcaggacgacggccggggtctggtgcttcctggctacaagtacctcggacccttcaacggactcgacaagggggagcccgtcaacgcggcggacgcagcggccctcgagcacgacaaggcctacgaccagcagctcaaagcgggtgacaatccgtacctgcggtataaccacgccgacgccgagtttcaggagcgtctgcaagaagatacgtcttttgggggcaacctcgggcgagcagtcttccaggccaagaagcgggttctcgaacctctcggtctggttgaggaaggcgctaagacggctcctggaaagaaacgtccggtagagcagtcgccacaagagccagactcctcctcgggcatcggcaagacaggccagcagcccgctaaaaagagactcaattttggtcagactggcgactcagagtcagtccccgatccacaacctctcggagaacctccagcaacccccgctgctgtggggcctactacaatggcttcaggcggtggcgcaccaatggcagacaataacgaaggcgtcgacggagtgggtaatgcctcaggaaattggcattgcgattccacatggctgggcgacagagtcatcaccaccagcacccgcacctgggccttgcccacctacaataaccacctctacaagcaaatctccagtgcttcaacgggggccagcaacgacaaccactacttcggctacagcaccccctgggggtattttgatttcaacagattccactgccacttttcaccacgtgactggcagcgactcatcaacaacaattggggattccggcccaagagactcaacttcaaactcttcaacatccaagtcaaggaggtcacgacgaatgatggcgttacaaccatcgctaataaccttaccagcacggttcaagtcttctcggactcggagtaccagcttccgtacgtcctcggctctgcgcaccagggctgcctccctccgttcccggcggacgtgttcatgattccgcaatacggctacctgacgctcaacaatggcagccaagccgtgggacgttcatccttttactgcctggaatatttcccttctcagatgctgagaacgggcaacaactttaccttcagctacacctttgaggaagtgcctttccacagcagctacgcgcacagccagagcctggaccggctgatgaatcctctcatcgaccaatacctgtattacctgaacagaactcaaaatcagtccggaagtgcccaaaacaaggacttgctgtttagccgtgggtctccagctggcatgtctgttcagcccaaaaactggctacctggaccctgttatcggcagcagcgcgtttctaaaacaaaaacagacaacaacaacagcaattttacctggactggtgcttcaaaatataacctcaatgggcgtgaatccatcatcaaccctggcactgctatggcctcacacaaagacgacgaagacaagttctttcccatgagcggtgtcatgatttttggaaaagagagcgccggagcttcaaacactgcattggacaatgtcatgattacagacgaagaggaaattaaagccactaaccctgtggccaccgaaagatttgggaccgtggcagtcaatttccagagcagcagcacagaccctgcgaccggagatgtgcatgctatgggagcattacctggcatggtgtggcaagatagagacgtgtacctgcagggtcccatttgggccaaaattcctcacacagatggacactttcacccgtctcctcttatgggcggctttggactcaagaacccgcctcctcagatcctcatcaaaaacacgcctgttcctgcgaatcctccggcggagttttcagccacaaagcttgcttcattcatcacccaatactccacaggacaagtgagtgtggaaattgaatgggagctgcagaaagaaaacagcaagcgctggaatcccgaagtgcagtacacatccaattatgcaaaatctgccaacgttgattttactgtggacaacaatggactttatactgagcctcgccccattggcacccgttaccttacccgtcccctg

SEQ ID NO: 659 - DNA, 2208 bp, Artificial Sequence
  source: /note="Description of Artificial Sequence: Synthetic polynucleotide"
atggctgccgatggttatcttccagattggctcgaggacaacctctctgagggcattcgcgagtggtgggacttgaaacctggagccccgaagcccaaagccaaccagcaaaagcaggacgacggccggggtctggtgcttcctggctacaagtacctcggacccttcaacggactcgacaagggggagcccgtcaacgcggcggacgcagcggccctcgagcacgacaaggcctacgaccagcagctcaaagcgggtgacaatccgtacctgcggtataaccacgccgacgccgagtttcaggagcgtctgcaagaagatacgtcttttgggggcaacctcgggcgagcagtcttccaggccaagaagcgggttctcgaacctctcggtctggttgaggaaggcgctaagacggctcctggaaagagacgtccggtagagcagtcgccacaagagccagactcctcctcgggcatcggcaagacaggccagcagcccgctaaaaagagactcaattttggtcagactggcgactcagagtcagtccccgatccacaacctctcggagaacctccagcaacccccgctgctgtgggacctactacaatggcttcaggcggtggcgcaccaatggcagacaataacgaaggcgccgacggagtgggtaatgcctcaggaaattggcattgcgattccacatggctgggcgacagagtcatcaccaccagcacccgcacctgggccttgcccacctacaataaccacctctacaagcaaatctccagtgcttcaacgggggccagcaacgacaaccactacttcggctacagcaccccctgggggtattttgatttcaacagattccactgccacttttcaccacgtgactggcagcgactcatcaacaacaattggggattccggcccaagagactcaacttcaaactcttcaacatccaagtcaaggaggtcacgacgaatgatggcgtcacaaccatcgctaataaccttaccagcacggttcaagtcttctcggactcggagtaccagcttccgtacgtcctcggctctgcgcaccagggctgcctccctccgttcccggcggacgtgttcatgattccgcaatacggctacctgacgctcaacaatggcagccaagccgtgggacgttcatccttttactgcctggaatatttcccttctcagatgctgagaacgggcaacaactttaccttcagctacacctttgaggaagtgcctttccacagcagctacgcgcacagccagagcctggaccggctgatgaatcctctcatcgaccaatacctgtattacctgaacagaactcaaaatcagtccggaagtgcccaaaacaaggacttgctgtttagccgtgggtctccagctggcatgtctgttcagcccaaaaactggctacctggaccctgttatcggcagcagcgcgtttctaaaacaaaaacagacaacaacaacagcaattttacctggactggtgcttcaaaatataacctcaatgggcgtgaatccatcatcaaccctggcactgctatggcctcacacaaagacgacgaagacaagttctttcccatgagcggtgtcatgatttttggaaaagagagcgccggagcttcaaacactgcattggacaatgtcatgattacagacgaagaggaaattaaagccactaaccctgtggccaccgaaagatttgggaccgtggcagtcaatttccagagcagcagcacagaccctgcgaccggagatgtgcatgctatgggagcattacctggcatggtgtggcaagatagagacgtgtacctgcagggtcccatttgggccaaaattcctcacacagatggacactttcacccgtctcctcttatgggcggctttggactcaagaacccgcctcctcagatcctcatcaaaaacacgcctgttcctgcgaatcctccggcggagttttcagctacaaagtttgcttcgttcatcacccaatactccacaggacaagtgagtgtggaaattgaatgggagctgcagaaagaaaacagcaagcgctggaatcccgaagtgcagtacacatccaattatgcaaaatctgccaacgttgattttactgtggacaacaatggactttatactgagcctcgccccattggcacccgttaccttacccgtcccctg

SEQ ID NO: 660 - DNA, 2208 bp, Artificial Sequence
  source: /note="Description of Artificial Sequence: Synthetic polynucleotide"
atggctgccgatggttatcttccagattggctcgaggacaacctctctgagggcattcgcgagtggtgggacttgaaacctggagccccgaagcccaaagccaaccagcaaaagcaggacgacggccggggtctggtgcttcctggctacaagtacctcggacccttcaacggactcgacaagggggagcccgtcaacgcggcggacgcagcggccctcgagcacgacaaggcctacgaccagcagctcaaagcgggtgacaatccgtacccgcggtataaccacgccgacgccgagtttcaggagcgtctgcaagaagatacgtcttttgggggcaacctcgggcgagcagtcttccaggccaagaagcgggttctcgaacctctcggtctggttggggaaggcgctaagacggctcctggaaagaaacgtccggtagagcagtcgccacaagagccagactcctcctcgggcatcggcaagacaggccagcagcccgctaaaaagagactcaattttggtcagactggcgactcagagtcagtccccgatccacaacctctcggagaacctccagcaacccccgctgctgtgggacctactacaatggcttcaggcggtggcgcaccaatggcagacaataacgaaggcgccgacggagtgggtaatgcctcaggaaattggcattgcgattccacatggctgggcgacagagtcatcaccaccagcacccgcacctgggccttgcccacctacaataaccacctctacaagcaaatctccagtgcttcaacgggggccagcaacgacaaccactacttcggctacagcaccccctgggggtattttgatttcaacagattccactgccacttttcaccacgtgactggcagcgactcatcaacaacaattggggattccggcccaagagactcaacttcaaactcttcaacatccaagtcaaggaggtcacgacgaatgatggcgtcacaaccatcgctaataaccttaccagcacggttcaagtcttctcggactcggagtaccagcttccgtacgtcctcggctctgcgcaccagggctgcctccctccgttcccggcggacgtgttcatgattccgcaatacggctacctgacgctcaacaatggcagccaagccgtgggacgttcatccttttactgcctggaatatttcccttctcagatgctgagaacgggcaacaactttaccttcagctacacctttgaggaagtgcctttccacagcagctacgcgcacagccagagcctggaccggctgatgaatcctcccatcgaccaatacctgtattacctgaacagaactcaaaatcagtccggaagtgcccaaaacaaggacttgctgtttagccgtgggtctccagctggcatgtctgttcagcccaaaaactggctacctggaccctgttatcggcagcagcgcgtttctaaaacaaaaacagacaacaacaacagcaattttacctggactggtgcttcaaaatataacctcaatgggcgtgaatccatcatcaaccctggcactgctatggcctcacacaaagacgacgaagacaagttctttcccatgagcggtgtcatgatttttggaaaagagagcgccggagcttcaaacactgcattggacaatgtcatgattacagacgaagaggaaattaaagccactaaccctgtggccaccgaaagatttgggaccgtggcagtcaatttccagagcagcagcacagaccctgcgaccggagatgtgcatgctatgggagcattacctggcatggtgtggcaagatagagacgtgtacctgcagggtcccatttgggccaaaattcctcacacagatggacactttcacccgtctcctcttatgggcggctttggactcaagaacccgcctcctcagatcctcatcaaaaacacgcctgttcctgcgaatcctccggcggagttttcagctacaaagtttgcttcattcatcacccaatactccacaggacaagtgagtgtggaaattgaatgggagctgcagaaagaaaacagcaagcgctggaatcccgaagtgcagtacacatccaattatgcaaaatctgccaacgttgattttactgtggacaacaatggactttatactgagcctcgccccattggcacccgttaccttacccgtcccctg

SEQ ID NO: 661 - DNA, 2208 bp, Artificial Sequence
  source: /note="Description of Artificial Sequence: Synthetic polynucleotide"
atggctgccgatggttatcttccagattggctcgaggacaacctctctgagggcattcgcgagtggtgggacttgaaacctggagccccgaagcccaaagccaaccagcaaaagcaggacgacggccggggtctggtgcttcctggctacaagtacctcggacccttcaacggactcgacaagggggagcccgtcaacgcggcggacgcagcggccctcgagcacgacaaggcctacgaccagcagctcaaagcgggtgacaatccgtacctgcggtataaccacgccgacgccgagtttcaggagcgtctgcaagaagatacgtcttttgggggcaacctcgggcgagcagtcttccaggccaagaagcgggttctcgaacctctcggtctggttgaggaaggcgctaagacggctcctggaaagaaacgtccggtagagcagtcgccacaagagccagactcctcctcgggcatcggcaagacaggccagcagcccgctaaaaagagactcaattttggtcagactggcgactcagagtcagtccccgatccacgacctctcggagaacctccagcaacccccgctgctgtgggacctactacaatggcttcaggcggtggcgcaccaatggcagacaataacgaaggcgccgacggagtgggtaatgcctcaggaaattggcattgcgattccacatggctgggcgacagagtcatcaccaccagcacccgcacctgggccttgcccacctacaataaccacctctacaagcaaatctccagtgcttcaacgggggccagcaacgacaaccactacttcggctacagcaccccctgggggtattttgatttcaacagattccactgccacttttcaccacgcgactggcagcgactcatcaacaacaattggggattccggcccaagagactcaacttcaaactcttcaacatccaagtcaaggaggtcacgacgaatgatggcgtcacaaccatcgctaataaccttaccagcacggttcaagtcttctcggactcggagtaccagcttccgtacgtcctcggctctgcgcaccagggctgcctccctccgttcccggcggacgtgttcatgattccgcaatacggctacctgacgctcaacaatggcagccaagccgtgggacgttcatccttttactgcctggaatatttcccttctcagatgctgagaacgggcaacaactttaccttcagctacacctttgaggaagtgcctttccacagcagctacgcgcacagccagagcctggaccggctgatgaatcctctcatcgaccaatacctgtattacctgaacagaactcaaaatcagtccggaagtgcccaaaacaaggacttgctgtttagccgtgggcctccagctggcatgtctgttcagcccaaaaactggctacctggaccctgttatcggcagcagcgcgtttctaaaacaaaaacagacaacaacaacagcaattttacctggactggtgcttcaaaatataacctcaatgggcgtgaatccatcatcaaccctggcactgctatggcctcacacaaagacgacgaagacaagttctttcccatgagcggtgtcatgatttttggaaaagagagcgccggagcttcaaacactgcattggacaatgtcatgattacggacgaagaggaaattaaagccactaaccctgtggccaccgaaagatttgggaccgtggcagtcaatttccagagcagcagcacagaccctgcgaccggagatgtgcatgctatgggagcattacctggcatggtgtggcaagatagagacgtgtacctgcagggtcccatttgggccaaaattcctcacacagatggacactttcacccgtctcctcttatgggcggctttggactcaagaacccgcctcctcagatcctcatcaaaaacacgcctgttcctgcgaatcctccggcggagttttcagctacaaagtttgcttcattcatcacccaatactccacaggacaagtgagtgtggaaattgaatgggagctgcagaaagaaaacagcaagcgctggaatcccgaagtgcagtacacatccaattatgcaaaatctgccaacgttgattttactgtggacaacaatggactttatactgagcctcgccccattggcacccgttaccttacccgtcccctg

SEQ ID NO: 662 - DNA, 2208 bp, Artificial Sequence
  source: /note="Description of Artificial Sequence: Synthetic polynucleotide"
atggctgccgatggttatcttccagattggctcgaggacaacctctctgagggcattcgcgagtggtgggacttgaaacctggagccccgaagcccaaagccaaccagcaaaagcaggacgacggccggggtctggtgcttcctggctacaagtacctcggacccttcaacggactcgacaagggggagcccgtcaacgcggcggacgcagcggccctcgagcacgacaaggcctacgaccagcagctcaaagcgggtgacaatccgtacctgcggtataaccacgccgacgccgagtttcaggagcgtctgcaagaagatacgtcttttgggggcaacctcgggcgagcagtcttccaggccaagaagcgggttctcgaacctctcggtctggttgaggaaggcgctaagacggctcctggaaagaaacgtccggtagagcagtcgccacaagagccagactcctcctcgggcatcggcaagacaggccagcagcccgctaaaaagagactcaattttggtcagactggcggctcagagtcagtccccgatccacaacctctcggagaacctccagcaacccccgctgctgtgggacctactacaatggcttcaggcggtggcgcaccaatggcagacaataacgaaggcgccgacggagtgggtaatgcctcaggaaattggcattgcgattccacatggctgggcgacagagtcatcaccaccagcacccgcacctgggccttgcccacctacaataaccacctctacaagcaaatctccagtgcttcaacgggggccagcaacgacaaccactacttcggctacagcaccccctgggggtattttgatttcaacagattccactgccacttttcaccacgtgactggcagcgactcatcaacaacaattggggattccggcccaagagactcaacttcaaactcttcaacatccaagtcaaggaggtcacgacgaatgatggcgtcacaaccatcgctaataaccttaccagcacggttcaagtcttctcggactcggagtaccagcttccgtacgtcctcggctctgcgcaccagggctgcctccctccgttcccggcggacgtgttcatgattccgcaatacggctacctgacgctcaacaatggcagccaagccgtgggacgttcatccttttactgcctggaatatttcccttctcagatgctgagaacgggcaacaactttaccttcagctacacctttgaggaagtgcctttccacagcagctacgcgcacagccagagcctggaccggctgatgaatcctcccatcgaccaatacctgtattacctgaacagaactcaaaatcagtccgggagtgcccaaaacaaggacttgctgtttagccgtgggtctccagctggcatgtctgttcagcccaaaaactggctacctggaccctgttatcggcagcagcgcgtttctaaaacaaaaacagacaacaacaacagcaattttacctggactggtgcttcaaaatataacctcaatgggcgtgaatccatcatcaaccctggcactgctatggcctcacacaaagacgacgaagacaagttctttcccatgagcggtgtcatgatttttggaaaagagagcgccggagcttcaaacactgcattggacaatgtcatgattacagacgaagaggaaattaaagccactaaccctgtggccaccgaaagatttgggaccgtggcagtcaatttccagagcagcagcacagaccctgcgaccggagatgtgcatgctatgggagcattacctggcatggtgtggcaagatagagacgtgtacctgcagggtcccatttgggccaaaattcctcacacagatggacactttcacccgtctcctcttatgggcggctttggactcaagaacccgcctcctcagatcctcatcaaaaacacgcctgttcctgcgaatcctccggcggagttttcagctacaaagtttgcttcattcatcacccaatactccacaggacaagtgagtgtggaaattgaatgggagctgcagaaagaaaacagcaagcgctggaatcccgaagtgcagtacacatccaattatgcaaaatctgccaacgttgactttactgtggacaacaatggactttatactgagcctcgccccattggcacccgttaccttacccgtcccctg

SEQ ID NO: 663 - DNA, 2208 bp, Artificial Sequence
  source: /note="Description of Artificial Sequence: Synthetic polynucleotide"
atggctgccgatggttatcttccagattggctcgaggacaacctctctgagggcattcgcgagtggtgggacttgaaacctggagccccgaagcccaaagccaaccagcaaaagcaggacgacggccggggtctggtgcttcctggctacaagtacctcggacccttcaacggactcgacaagggggagcccgtcaacgcggcggacgcagcggccctcgagcacgacaaggcctacgaccagcagctcaaagcgggtgacaatccgtacctgcggtataaccacgccgacgccgagtttcaagagcgtctgcaagaagatacgtcttttgggggcaacctcgggcgagcagtcttccaggccaagaagcgggttctcgaacctctcggtctggttgaggaaggcgctaagacggctcctggaaagaaacgtccggtagagcagtcgccacaagagccagactcctcctcgggcatcggcaagacaggccagcagcccgctaaaaagagactcaattttggtcagactggcgactcagagtcagtccccgatccgcaacctctcggagaacctccagcaacccccgctgctgtgggacctactacaatggcttcaggcggtggcgcaccaatggcagacaataacgaaggcgccgacggagtgggtaatgcctcaggaaattggcattgcgattccacatggctgggcgacagagtcatcaccaccagcacccgcacctgggccttgcccacctacaataaccacctctacaagcaaatctccagtgcttcaacgggggccagcaacgacaaccactacttcggctacagcaccccctgggggtattttgatttcaacagattccactgccacttttcaccacgtgactggcagcgactcatcaacaacaattggggattccggcccaagagactcaacttcaaactcttcaacatccaagtcaaggaggtcacgacgaatgatggcgtcacaaccatcgctaataaccttaccagcacggttcaagtcttctcggactcggagtaccagcttccgtacgtcctcggctctgcgcaccagggctgcctccctccgttcccggcggacgtgttcatgattccgcaatacggctacctgacgctcaacaatggcagccaagccgtgggacgttcatccttttactgcctggaatatttcccttctcagatgctgagaacgggcaacaactttaccttcagctacacctttgaggaagtgcctttccacagcagctacgcgcacagccagagcctggaccggctgatgaatcctctcatcgaccaatacctgtattacctgaacagaactcaaaatcagtccggaagtgcccaaaacaaggacttgctgtttagccgtgggtctccagctggcatgtctgttcagcccaaaaactggctacctggaccctgttatcggcagcagcgcgtttctaaaacaaaaacagacaacaacaacagcaattttacctggactggtgcttcaaaatataacctcaatgggcgtgaatccatcatcaaccctggcactgctgtggcctcacacaaagacgacgaagacaagttctttcccatgagcggtgtcatgatttttggaaaagagagcgccggagcttcaaacactgcattggacaatgtcatgattacagacgaagaggaaattaaagccactaaccctgtggccaccgaaagatttgggaccgtggcagtcaatttccagagcagcagcacagaccctgcgaccggagatgtgcatgctatgggagcattacctggcatggtgtggcaagatagagacgtgtacctgcagggtcccatttgggccaaaattcctcacacagatggacactttcacccgtctcctcttatgggcggctttggactcaagaacccgcctcctcagatcctcatcaaaaacacgcctgttcctgcgaatcctccggcggagttttcagctacaaagtttgcttcattcatcacccaatactccacaggacaagtgagtgtggaaattgaatgggagctgcagaaagaaaacagcaagcgctggaatcccgaagtgcagtacacatccaattatgcaaaatctgccaacgttgattttactgtggacaacaatggactttatactgagcctcgccccattggcacccgttaccttacccgtcccctg

SEQ ID NO: 664 - DNA, 2208 bp, Artificial Sequence
  source: /note="Description of Artificial Sequence: Synthetic polynucleotide"
atggctgccgatggttatcttccagattggctcgaggacaacctctctgagggcattcgcgagtggtgggacttgaaacctggagccccgaagcccaaagccaaccagcaaaagcaggacgacggccggggtctggtgcttcctggctacaagtacctcggacccttcaacggactcgacaagggggagcccgtcaacgcggcggacgcagcggccctcgagcacgacaaggcctacgaccagcagctcaaagcgggtgacaatccgtacctgcggtataaccacgccgacgccgagtttcaggagcgtctgcaagaagatacgtcttttgggggcaacctcgggcgagcagtcttccaggccaagaagcgggttctcgaacctctcggtctggttgaggaaggcgctaagacggctcctggaaagaaacgtccggtagagcagtcgccacaagagccagactcctcctcgggcatcggcaagacaggccagcagcccgctaaaaagagactcaattttggtcagactggcgactcagagtcagtccccgatccacaacctctcggagaacctccagcaacccccgctgctgtgggacctactacaatggcttcaggcggtggcgcaccaatggcagacaataacgaaggcgccgacggagtgggtaatgcctcaggaaattggcattgcgattccacatggctgggcgacagagtcatcaccaccagcacccgcacctgggccttgcccacctacaataaccacctctacaagcaaatctccagtgcttcaacgggggccagcaacgacaaccactacttcggctacagcaccccctgggggtattttgatttcaacagattccactgccacttttcaccacgtgactggcagcaactcatcaacaacaattggggattccggcccaagagactcaacttcaaactcttcaacatccaagtcaaggaggtcacgacgaatgatggcgtcacaaccatcgctaataaccttaccagcacggttcaagtcttctcggactcggagtaccagcttccgtacgtcctcggctctgcgcaccagggctgcctccctccgttcccggcggacgtgttcatgattccgcaatacggctacctgacgctcaacaatggcagccaagccgtgggacgttcatccttttactgcctggaatatttcccttctcagatgctgagaacgggcaacaactttaccttcagctacacctttgaggaagtgcctttccacagcagctacgcgcacagccagagcctggaccggctgatgaatcctctcatcgaccaatacctgtattacctgaacagaactcaaaatcagtccggaagtgcccaaaacaaggacttgctgtttagccgtgggtctccagctggcatgtctgttcagcccaaaaactggctacctggaccctgttatcggcagcagcgcgtttctaaaacaaaaacagacaacaacaacagcaattttacctggactggtgcttcaaaatataacctcaatgggcgtgaatccatcatcaaccctggcactgctatggcctcacacaaagacgacgaagacaagttctttcccatgagcggtgtcatgatttttggaaaagagagcgccggagcttcaaacactgcattggacaatgtcatgattacagacgaagaggaaattaaagccactaaccctgtggccaccgaaagatttgggaccgtggcagtcaatttccagagcaccagcacagaccctgcgaccggagatgtgcatgctatgggagcattacctggcatggtgtggcaagatagagacgtgtacctgcagggtcccatttgggccaaaattcctcacacagatggacactttcacccgtctcctcttatgggcggctttggactcaagaacccgcctcctcagatcctcatcaaaaacacgcctgttcctgcgaatcctccggcggagttttcagctacaaagtttgcttcattcatcacccaatactccacaggacaagtgagtgtggaaattgaatgggagctgcagaaagaaaacagcaagcgctggaatcccgaagtgcagtacacatccaattatgcaaaatctgccgacgttgattttactgtggacaacaatggactttatactgagcctcgccccattggcacccgttaccttacccgtcccctg

SEQ ID NO: 665 - DNA, 2208 bp, Artificial Sequence
  source: /note="Description of Artificial Sequence: Synthetic polynucleotide"
atggctgccgatggttatcttccagattggctcgaggacaacctctctgagggcattcgcgagtggtgggacttgaaacctggagccccgaagcccaaagccaaccagcaaaagcaggacgacggccggggtctggtgcttcctggctacaagtacctcggacccttcaacggactcgacaagggggagcccgtcaacgcggcggacgcagcggccctcgagcacgacaaggcctacgaccagcagctcaaagcgggtgacaatccgtacctgcggtataaccacgccgacgccgagtttcaagagcgtctgcaagaagatacgtcttttgggggcaacctcgggcgagcagtcttccaggccaagaagcgggttctcgaacctctcggtctggttgaggaaggcgctaagacggctcctggaaagaaacgtccggtagagcagtcgccacaagagccagactcctcctcgggcatcggcaagacaggccagcagcccgctaaaaagagactcaattttggtcagactggcgactcagagtcagtccccgatccgcaacctctcggagaacctccagcaacccccgctgctgtgggacctactacaatggcttcaggcggtggcgcaccaatggcagacaataacgaaggcgccgacggagtgggtaatgcctcaggaaattggcattgcgattccacatggctgggcgacagagtcatcaccaccagcacccgcacctgggccttgcccacctacaataaccacctctacaagcaaatctccagtgcttcaacgggggccagcaacgacaaccactacttcggctacagcaccccctgggggtattttgatttcaacagattccactgccacttttcaccacgtgactggcagcgactcatcaacaacaattggggattccggcccaagagactcaacttcaaactcttcaacatccaagtcaaggaggtcacgacgaatgatggcgtcacaaccatcgctaataaccttaccagcacggttcaagtcttctcggactcggagtaccagcctccgtacgtcctcggctctgcgcaccagggctgcctccctccgttcccggcggacgtgttcatgattccgcaatacggccacctgacgctcaacaatggcagccaagccgtgggacgttcatccttttactgcctggaatatttcccttctcagatgctgagaacgggcaacaactttaccttcagctacacctttgaggaagtgcctttccacagcagctacgcgcacagccagagcctggaccggctgacgaatcctctcatcgaccaatacctgtattacctgaacagaactcaaaatcagtccggaagtgcccaaaacaaggacttgctgtttagccgtgggtctccagctggcatgtctgttcagcccaaaaactggctacctggaccctgttatcggcagcagcgcgtttctaaaacaaaaacagacaacaacaacagcaattttacctggactggtgcttcaaaatataacctcaatgggcgtgaatccatcatcaaccctggcactgctatggcctcacacaaagacgacgaagacaagttctttcccatgagcggtgtcatgatttttggaaaagagagcgccggagcttcaaacactgcattggacaatgtcatgattacagacgaagaggaaattaaagccactaaccctgtggccaccgaaagatttgggaccgtggcagtcaatttccagagcagcagcacagaccctgcgaccggagatgtgcatgctatgggagcattacctggcatggtgtggcaagatagagacgtgtacctgcagggtcccatttgggccaaaattcctcacacagatggacactttcacccgtctcctcttatgggcggctttggactcaagaacccgcctcctcagatcctcatcaaaaacacgcctgttcctgcgaatcctccggcggagttttcagctacaaagtttgcttcattcatcacccaatactccacaggacaagtgagtgtggaaattgaatgggagctgcagaaagaaaacagcaagcgctggaatcccgaagtgcagtacacatccaattatgcaaaatctgccaacgttgattttactgtggacaacaatggactttatactgagcctcgccccattggcacccgttaccttacccgtcccctg

SEQ ID NO: 666 - DNA, 2208 bp, Artificial Sequence
  source: /note="Description of Artificial Sequence: Synthetic polynucleotide"
atggctgccgatggttatcttccagattggctcgaggacaacctctctgagggcattcgcgagtggtgggacttgaaacctggagccccgaagcccaaagccaaccagcaagagcaggacgacggccggggtctggtgcttcctggctacaagtacctcggacccttcaacggactcgacaagggggagcccgtcaacgcggcggacgcagcggccctcgagcacgacaaggcctacgaccagcagctcaaagcgggtgacaatccgtacctgcggtataaccacgccgacgccgagtttcaggagcgtctgcaagaagatacgtcttttgggggcaacctcgggcgagcagtcttccaggccaagaagcgggttctcgaacctctcggtctggttgaggaaggcgctaagacggctcctggaaagaaacgtccggtagagcagtcgccacaagagccagactcctcctcgggcatcggcaagacaggccagcagcccgctaaaaagagactcaattttggtcagactggcgactcagagtcagtccccgatccacaacctctcggagaacctccagcaacccccgctgctgtgggacctactacaatggcttcaggcggtggcgcaccaatggcagacaataacgaaggcgccgacggagtgggtaatgcctcaggaaattggcattgcgattccacatggctgggcgacagagtcatcaccaccagcacccgcacctgggccttgcccacctacaataaccacctctacaagcaaatctccagtgcttcaacgggggccagcaacgacaaccactacttcggctacagcaccccctgggggtattttgatttcaacagattccactgccacttttcaccacgtgactggcagcgactcatcaacaacaattggggattccggcccaagagactcaacttcaaactcttcaacatccaagtcaaggaggtcacgacgaatgatggcgtcacaaccatcgctaataaccttaccagcacggttcaagtcttctcggactcggagtaccagcttccgtacgtcctcggctctgcgcaccagggctgcctccctccgttcccggcggacgtgttcatgattccgcaatacggctacctgacgctcaacaatggcagccaagccgtgggacgttcatccttttactgcctggaatatttcccttctcagatgctgagaacgggcaacaactttaccttcagctacacctttgaggaagtgcctttccacagcagctacgcgcacagccagagcctggaccggctgatgaatcctctcatcgaccaatacctgtattacctgaacagaactcaaaatcagtccggaagtgcccaaaacaaggacttgctgtttagccgtgggtctccagctggcatgtctgttcagcccaaaaactggctacctggaccctgttatcggcagcagcgcgtttctaaaacaaaaacagacaacaacaacagcaattttacctggactggtgcttcaaaatataacctcaatgggcgtgaatccatcatcaaccctggcactgctatggcctcacacaaagacgacgaagacaagttctttcccatgagcggtgtcatgatttttggaaaagagagcgccggagcttcaaacactgcattggacaatgtcatgattacagacgaagaggaaattaaagccactaaccctgtggccaccgaaagatttgggaccgtggcagtcaatttccagagcagcagcacagaccctgcgaccggagatgtgcatgctacgggaacattacctggcatggtgtggcaagatagagacgtgtacctgcagggtcccatttgggccaaaattcctcacacagatggacactttcacccgtctcctcttatgggcggctttggactcaagaacccgcctcctcagatcctcatcaaaaccacgcctgttcctgcgaatcctccggcggagttttcagctacaaagtttgcttcattcatcacccagtactccacaggacaagtgagtgtggaaattgaatgggagctgcagaaagaaaacagcaagcgctggaatcccgaagtgcagtacacatccaattatgcaaaatctgccaacgttgattttactgtggacgacaatggactttatactgagcctcgccccattggcacccgttaccttacccgtcccctg

SEQ ID NO: 667 - DNA, 2208 bp, Artificial Sequence
  source: /note="Description of Artificial Sequence: Synthetic polynucleotide"
atggctgccgatggttatcttccagattggctcgaggacaacctctctgagggcattcgcgagtggtgggacttgaaacctggagccccgaagcccaaagccaaccagcaaaagcaggacgacggccggggtctggtgcttcctggctacaagtacctcggacccttcaacggactcgacaagggggagcccgtcaacgcggcggacgcagcggccctcgagcacgacaaggcctacgaccagcagctcaaagcgggtgacaatccgtacctgcggtataaccacgccgacgccgagtttcaggagcgtctgcaagaagatacgtcttttgggggcaacctcgggcgagcagtcttccaggccaagaagcgggttctcgaacctctcggtctggttgaggaaggcgctaagacggctcctggaaagaaacgtccggtagagcagtcgctacaagagccagactcctcctcgggcatcggcaagacaggccagcagcccgctaaaaagagactcaattttggtcagactggcgactcagagtcagtccccgatccacaacctctcggagaacctccagcaacccccgctgctgtgggacctactacaatggcttcaggcggtggcgcaccaatggcagacaataacgaaggcgccgacggagtgggtaatgcctcaggaaattggcattgcgattccacatggctgggcgacagagtcatcaccaccagcacccgcacctgggccttgcccacctacaataaccacctctacaagcaaatctccagtgcttcaacgggggccagcaacgacaaccactacttcggctacagcaccccctgggggtattttgatttcaacagattccactgccacttttcaccacgtgactggcagcgactcatcaacaacaattggggattccggcccaagagactcaacttcaaactcttcaacatccaagtcaaggaggtcacgacgaatgatggcgtcacaaccatcgctaataaccttaccagcacggttcaagtcttctcggactcggagtaccagcttccgtacgtcctcggctctgcgcaccagggctgcctccctccgttcccggcggacgtgttcatgattccgcaatacggctacctgacgctcaacaatggcagccaagccgtgggacgttcatccttttactgcctggaatatttcccttctcagatgctgagaacgggcaacaactttaccttcagctacacctttgaggaagtgcctttccacagcagctacgcgcacagccagagcctggaccggctgatgaatcctctcatcgaccaatacctgtattacctgaacagaactcaaaatcagtccggaagtgcccaaaacaaggacttgctgtttagccgtgggtctccagctggcatgtctgttcagcccaaaaactggctacctggaccctgttatcggcagcagcgcgtttctaaaacaaaaacagacaacgacaacagcaattttacctggactggtgcttcaaaatataacctcaatgggcgtgaatccatcatcaaccctggcactgctatggcctcacacaaagacgacgaagacaagttctttcccatgagcggtgtcatgatttttggaaaagagagcgccggagcttcaaacactgcattggacaatgtcatgattacagacgaagaggaaattaaagccactaaccctgtggccaccgaaagatttgggaccgtggcagtcaatttccagagcagcagcacagaccctgcgaccggagatgtgcatgctatgggagcattacctggcatggtgtggcaagatagagacgtgtacctgcagggtcccatttgggccaaaattcctcacacagatggacactttcacccgtctcctcttatgggcggctttggactcaagaacccgcctcctcagatcctcatcaaaaacacgcctgttcctgcgaatcctccggcggagttttcagctacaaagtttgcttcattcatcacccaatactccacaggacaagtgagtgtggaaattgaatgggagctgcagaaagaaaacagcaagcgctggaatcccgaagtgcagtacacatccaattatgcaaaatctgccaacgttgattttactgtggacaacaatggactttatactgagcctcgccccattggcacccgttaccttacccgtcccctg

SEQ ID NO: 668 - DNA, 2208 bp, Artificial Sequence
  source: /note="Description of Artificial Sequence: Synthetic polynucleotide"
atggctgccgatggttatcttccagattggctcgaggacaacctctctgagggcattcgcgagtggtgggacttgaaacctggagctccgaagcccaaagccaaccagcaaaagcaggacgacggccggggtctggtgcttcctggctacaagtacctcggacccttcaacggactcgacaagggggagcccgtcaacgcggcggacgcagcggccctcgagcacgacaaggcctacgaccagcagctcaaagcgggtgacaatccgtacctgcggtataaccacgccgacgccgagtttcaggagcgtctgcaagaagatacgtcttttgggggcaacctcgggcgagcagtcttccaggccaagaagcgggttctcgaacctctcggtctggttgaggaaggcgctaagacggctcctggaaagaaacgtccggtagagcagtcgccacaagagccagactcctcctcgggcatcggcaagacaggccagcagcccgctaaaaagagactcaattttggtcagactggcgactcagagtcagtccccgatccacaacctctcggagaacctccagcaacccccgctgctgtgggacctactacaatggcttcaggcggtggcgcaccaatggcagacaataacgaaggcgccgacggagtgggtaatgcctcaggaaattggcattgcgattccacatggctgggcgacagagtcatcaccaccagcacccgcacctgggccttgcccacctacaataaccacctctacaagcaaatctccagtgcttcaacgggggccagcaacgacaaccactacttcggctacagcaccccctgggggtattttgatttcaacagattccactgccacttttcaccacgtgactggcagcgactcatcaacaacaattggggattccggcccaagagactcaacttcaaactcttcaacatccaagtcaaggaggtcacgacgaatgatggcgtcacaaccatcgctaataaccttaccagcacggttcaagtcttctcggactcggagtaccagcttccgtacgtcctcggctctgcgcaccagggctgcctccctccgttcccggcggacgtgttcatgattccgcaatacggctacctgacgctcaacaatggcagccaagccgtgggacgttcatccttttactgcctggaatatttcccttctcagatgctgagaacgggcaacaactttaccttcagctacacctttgaggaagcgcctttccacagcagctacgcgcacagccagagcctggaccggctgatgaatcctctcatcgaccaatacctgtattacctgaacagaactcaaaatcagtccggaagtgcccaaaacaaggacttgctgtttagccgtgggtctccagctggcatgtctgttcagcccaaaaactggctacctggaccctgttatcggcagcagcgcgtttctaaaacaaaaacagacaacaacaacagcaattttacctggactggtgcttcaaaatataacctcaatgggcgtgaatccatcatcaaccctggcactgctatggcctcacacaaagacgacgaagacaagttctttcccatgagcggtgtcatgatttttggaaaagagagcgccggagcttcaaacactgcattggacaatgtcatgattacagacgaagaggaaattaaagccactaaccctgtggccaccgaaagatttgggaccgtggcagtcaatttccagagcagcagcacagaccctgcgaccggagatgtgcatgctatgggagcattacctggcatggtgtggcaagatagagacgtgtacctgcagggtcccatttgggccaaaattcctcacacagatggacactttcacccgtctcctcttatgggcggctttggactcaagaacccgcctcctcagatcctcatcaaaaacacgcctgttcctgcgaatcctccggcggagttttcagctacaaagtttgcttcattcatcacccaatactccacaggacaagtgagtgtggaaattgaatgggagctgcagaaagaaaacagcaagcgctggaatcccgaagtgcagtacacatccaattatgcgaaatctgccaacgttgattttactgtggacaacaatggactttatactgagcctcgccccgttggcacccgttaccttacccgtcccctg

SEQ ID NO: 669 - DNA, 2208 bp, Artificial Sequence
  source: /note="Description of Artificial Sequence: Synthetic polynucleotide"
atggctgccgatggttatcttccagattggctcgaggacaacctctctgagggcattcgcgagtggtgggacttgaaacctggagccccgaagcccaaagccaaccagcaaaagcaggacgacggccggggtctggtgcttcctggctacaagtacctcggacccttcaacggactcgacaagggggagcccgtcaacgcggcggacgcagcggccctcgagcacgacaaggcctacgaccagcagctcaaagcgggtgacaatccatacctgcggtataaccacgccgacgccgagtttcaggagcgtctgcaagaaaatacgtcttttgggggcaacctcgggcgagcagtcttccaggccaagaagcgggttctcgaacctctcggtctggttgaggaaggcgctaagacggctcctggaaagaaacgtccggtagagcagtcgccacaagagccagactcctcctcgggcatcggcaagacaggccagcagcccgctaaaaagagactcaattttggtcagactggcgactcagagtcagtccccgatccacaacctctcggagaacctccagcaacccccgctgctgtgggacctactacaatggcttcaggcggtggcgcaccaatggcagacaataacgaaggcgccgacggagtgggtaatgcctcaggaaattggcattgcgattccacatggctgggcgacagagtcatcaccaccagcacccgcacctgggccttgcccacctacaataaccacctctacaagcaaatctccagtgcttcaacgggggccagcaacgacaaccactacttcggctacagcaccccctgggggtattttgatttcaacagattccactgccactttccaccacgtgactggcagcgactcatcaacaacaattggggattccggcccaagagactcaacttcaaactcttcaacatccaagtcaaggaggtcacgtcgaatgatggcgtcacaaccatcgctaataaccttaccagcacggttcaagtcttctcggactcggagtaccagcttccgtacgtcctcggctctgcgcaccagggctgcctccctccgttcccggcggacgtgttcatgattccgcaatacggctacctgacgctcaacaatggcagccaagccgtgggacgttcatccttttactgcctggaatatttcccttctcagatgctgagaacgggcaacaactttaccttcagctacacctttgaggaagtgcctttccacagcagctacgcgcacagccagagcctggaccggctgatgaatcctctcatcgaccaatacctgtattacctgaacagaactcaaaatcagtccggaagtgcccaaaacaaggacttgctgtttagccgtgggtctccagctggcatgtctgttcagcccaaaaactggctacctggtccctgttatcggcagcagcgcgtttctaaaacaaaaacagacaacaacaacagcaattttacctggactggtgcttcaaaatataacctcaatgggcgtgaatccatcatcaaccctggcactgctatggcctcacacaaagacgacgaagacaagttctttcccatgagcggtgtcatgatttttggaaaagagagcgccggagcttcaaacactgcattggacaatgtcatgattacagacgaagaggaaattaaagccactaaccctgtggccaccgaaagatttgggaccgtggcagtcaatttccagagcagcagcacagaccctgcgaccggagatgtgcatgctatgggagcattacctggcatggtgtggcaagatagagacgtgtacctgcagggtcccatttgggccaaaattcctcacacagatggacactttcacccgtctcctcttatgggcggctttggactcaagaacccgcctcctcagatcctcatcaaaaacacgcctgttcctgcgaatcctccggcggagttttcagctacaaagtttgcttcattcatcacccaatactccacaggacaagtgagtgtggaaattgaatgggagctgcagaaagaaaacagcaagcgctggaatcccgaagtgcagtacacatccaattatgcaaaatctgccaacgttgattttactgtggacaacaatggactttatactgagcctcgccccattggcacccgttaccttacccgtcccctg

SEQ ID NO: 670 - DNA, 2208 bp, Artificial Sequence
  source: /note="Description of Artificial Sequence: Synthetic polynucleotide"
atggctgccgatggttatcttccagattggctcgaggacaacctctctgagggcattcgcgagtggtgggacttgaaacctggagccccgaagcccaaagccaaccagcaaaagcaggacgacggccggggtctggtgcttcctggctacaagtacctcggacccttcaacggactcgacaagggggagcccgtcaacgcggcggacgcagcggccctcgagcacgacaaggcctacgaccagcagctcaaagcgggtgacaatccgtacctgcggtataaccacgccgacgccgagtttcaggagcgtctgcaagaagatacgtcttttgggggcaacctcgggcgagcagtcttccaggccaagaagcgggttctcgaacctctcggtctggttgaggaaggcgctaagacggctcctggaaagaaacgtccggtagagcagtcgccacaagagccagactcctcctcgggcatcggcaagacaggccagcagcccgctaaaaagagactcaattttggtcagactggcgactcagagtcagtccccgatccacaacctctcggagaacctccagcaacccccgctgctgtgggacctactacaatggcttcaggcggtggcgcaccaatggcagacaataacgaaggcgccgacggagtgggtaatgcctcaggaaattggcattgcgattccacatggctgggcgacagagtcatcaccaccagcacccgcacctgggccttgcccacctacaataaccacctctacaagcaaatctccagtgcttcaacgggggccagcaacgacaaccactacttcggctacagcaccccctgggggtattttgatttcaacagattccactgccacttttcaccacgtgactggcagcgactcatcaacaacaattggggattccggcccaagagactcaacttcaaactcttcaacatccaagtcaaggaggtcacgacgaatgatggcgtcacaaccatcgctaataaccttaccagcacggttcaagtcttctcggactcggagtaccagcttccgtacgtcctcggctctgcgcaccagggctgcctccctccgttcccggcggacgtgttcatgattccgcaatacggctacctgacgctcaacaatggcagccaagccgtgggacgttcatccttttactgcctggaatatttcccttctcagatgctgagaacgggcaacaactttaccttcagctacacctttgaggaagtgcctttccacagcagctacgcgcacagccagagcctggaccggctgatgaatcctctcatcgaccaatacctgtattacctgaacagaactcaaaatcagtccggaagtgcccaaaacaaggacttgctgtttagccgtgggtctccagctggcacgtctgttcagcccaaaaactggctacctggaccctgttatcggcagcagcgcgtttctaaaacaaaaacagacaacaacaacagcaattttacctggactggtgcttcaaaatataacctcaatgggcgtgaatccatcatcaaccctggcactgctatggcctcacacaaagacgacgaagacaagttctttcccatgagcggtgtcatgatttttggaaaagagagcgccggagcttcaaacactgcattggacaatgtcatgattacagacgaagaggaaattaaagccactaaccctgtggccaccgaaagatttgggaccgtggcagtcaatttccagagcagcagcacagaccctgcgaccggagatgtgcatgctatgggagcattacctggcatggtgtggcaagatagagacgtgtacctgcagggtcccatttgggccaaaattcctcacacagatggacactttcacccgtctcctcttatgggcggctttggactcaagaacccgcctcctcagatcctcatcaaaaacacgcctgttcctgcgaatcctccggcggagttttcagctacaaagtttgcttcattcatcacccaatactccacaggacaagtgagtgtggaaattgaatgggagctgcagaaagaaaacagcaagcgctggaatcccgaagtgcagtacacatccaattatgcaaaatctgccaacgttgattttactgtggacaacaatggactttatactgggcctcgccccattggcacccgttaccttacccgtcccctg

SEQ ID NO: 671 - DNA, 2208 bp, Artificial Sequence
  source: /note="Description of Artificial Sequence: Synthetic polynucleotide"
atggctgccgatggttatcttccagattggctcgaggacaacctctctgagggcattcgcgagtggtgggacttgaaacctggagccccgaagcccaaagccaaccagcaaaagcaggacgacggccggggtctggtgcttcctggctacaagtacctcggacccttcaacggactcgacaagggggagcccgtcaacgcggcggacgcagcggccctcgagcacgacaaggcctacgaccagcagctcaaagcgggtgacaatccgtacctgcggtataaccacgccgacgccgagtttcaggagcgtctgcaagaagatacgtcttttgggggcaacctcgggcgagcagtcttccaggccaagaagcgggttctcgaacctctcggtctggttgaggaaggcgctaagacggctcctggaaagaaacgtccggtagagcagtcgccacaagagccagactcctcctcgggcatcggcaagacaggccagcagcccgctaaaaagagactcaattttggtcagactggcgactcagagtcagtccccgatccacaacctctcggagaacctccagcaacccccgctgctgtgggacctactacaatggcttcaggcggtggcgcaccaatggcagacaataacgaaggcgccgacggagtgggtaatgccccaggaaattggcattgcgactccacatggctgggcgacagagtcatcaccaccagcacccgcacctgggccttgcccacctacaataaccacctctacaagcaaatctccagtgcttcaacgggggccagcaacgacaaccactacttcggctacagcaccccctgggggtattttgatttcaacagattccactgccacttttcaccacgtgactggcagcgactcatcaacaacaattggggattccggcccaagagactcaacttcaaactcttcaacatccaagtcaaggaggtcacgacgaatgatggcgtcacaaccatcgctaataaccttaccagcacggttcaagtcttctcggactcggagtaccagcttccgtacgtcctcggctctgcgcaccagggctgcctccctccgttcccggcggacgtgttcatgattccgcaatacggctacctgacgctcaacaatggcagccaagccgtgggacgttcatccttttactgcctggaatatttcccttctcagatgctgagaacgggcaacaactttaccttcagctacacctttgaggaagtgcctttccacagcagctacgcgcacagccagagcctggaccggctgatgaatcctctcatcgaccaatacctgtattacctgaacagaactcaaaatcagtccggaagtgcccaaaacaaggacttgctgtttagccgtgggtctccagctggcatgtctgttcagcccaaaaactggctacctggaccctgttatcggcagcagcgcgtttctaaaacaaaaacagacaacaacaacagcaattttacctggactggtgcttcaaaatataacctcaatgggcgtgaatccatcatcaaccctggcacagctatggcctcacacaaagacgacgaagacaagttctttcccatgagcggtgtcatgatttttggaaaagagagcgccggagcttcaaacactgcattggacaatgtcatgattacaggcgaagaggaaattaaagccactaaccctgtggccaccgaaagatttgggaccgtggcagtcaatttccagagcagcagcacagaccctgcgaccggagatgtgcatgctatgggagcattacctggcatggtgtggcaagatagagacgtgtacctgcagggtcccatttgggccaaaattcctcacacagatggacactttcacccgtctcctcttatgggcggctttggactcaagaacccgcctcctcagatcctcatcaaaaacacgcctgttcctgcgaatcctccggcggagttttcagctacaaagtttgcttcattcatcacccaatactccacaggacaagtgagtgtggaaattgaatgggagctgcagaaagaaaacagcaagcgctggaatcccgaagtgcagtacacatccaattatgcaaaatctgccaacgttgattttactgtggacaacaatggactttatactgagcctcgccccattggcacccgttaccttacccgtcccctg

SEQ ID NO: 672 - DNA, 2208 bp, Artificial Sequence
  source: /note="Description of Artificial Sequence: Synthetic polynucleotide"
atggctgccgatggttatcttccagattggctcgaggacaacctctctgagggcattcgcgagtggtgggacttgaaacctggagccccgaagcccaaagccaaccagcaaaagcaggacgacggccggggtctggtgcttcctggctacaagtacctcggacccttcaacagactcgacaagggggagcccgtcaacgcggcggacgcagcggccctcgagcacgacaaggcctacgaccagcagctcaaagcgggtgacaatccgtacctgcggtataaccacgccgacgccgagtttcaggagcgtctgcaagaagatacgtcttttgggggcaacctcgggcgagcagtcttccaggccaagaagcgggttctcgaacctctcggtctggttgaggaaggcgctaagacggctcctggaaggaaacgtccggtagagcagtcgccacaagagccagactcctcctcgggcatcggcaagacaggccagcagcccgctaaaaagagactcaattttggtcagactggcgactcagagtcagtccccgatccacaacctctcggagaacctccagcaacccccgctgctgtgggacctactacaatggcttcaggcggtggcgcgccaatggcagacaataacgaaggcgccgacggagtgggtaatgcctcaggaaattggcattgcgattccacatggctgggcgacagagtcatcaccaccagcacccgcacctgggccttgcccacctacaataaccacctctacaagcaaatctccagtgcttcaacgggggccagcaacgacaaccactacttcggctacagcaccccctgggggtattttgatttcaacagattccactgccacttttcaccacgtgactggcagcgactcatcaacaacaattggggattccggcccaagagactcaacttcaaactcttcaacatccaagtcaaggaggtcacgacgaatgatggcgtcacaaccatcgctaataaccttaccagcacggttcaagtcttctcggactcggagtaccagcttccgtacgtcctcggctctgcgcaccagggctgcctccctccgttcccggcggacgtgttcatgattccgcaatacggctacctgacgctcaacaatggcggccaagccgtgggacgttcatccttttactgcctggaatatttcccttctcagatgctgagaacgggcaacaactttaccttcagctacacctttgaggaagtgcctttccacagcagctacgcgcacagccagagcctggaccggctgatgaatcctctcatcgaccaatacctgtattacctgaacagaactcaaaatcagtccggaagtgcccaaaacaaggacttgctgtttagccgtgggtctccagctggcatgtctgttcagcccaaaaactggctacctggaccctgttatcggcagcagcgcgtttctaaaacaaaaacagacaacaacaacagcaattttacctggactggtgcttcaaaatatagcctcaatgggcgtgaatccatcatcaaccctggcactgctatggcctcacacaaagacgacgaagacaagttctttcccatgggcggtgtcatgatttttggaaaagagagcgccggagcttcaaacactgcattggacaatgccatgattacagacgaagaggaaattaaagccactaaccctgtggccaccgaaagatttgggaccgtggcagtcaatttccagagcagcagcacagaccctgcgaccggagatgtgcatgctatgggagcattacctggcatggtgtggcaagatagagacgtgtacctgcagggtcccatttgggccaaaattcctcacacagatggacactttcacccgtctcctcttatgggcggctttggactcaagaacccgcctcctcagatcctcatcaaaaacacgcctgttcctgcgaatcctccggcggagttttcagctacaaagtttgcttcattcatcacccaatactccacaggacaagtgagtgtggaaattgaatgggagctgcagaaagaaaacagcaagcgctggaatcccgaagtgcagtacacatccaattatgcaaaatctgccaacgttgattttactgtggacaacaatggactttatactgagcctcgccccattggcacccgttaccttacccgtcccctg

SEQ ID NO: 673 - DNA, 2208 bp, Artificial Sequence
  source: /note="Description of Artificial Sequence: Synthetic polynucleotide"
atggctgccgatggttatcttccagattggctcgaggacaacctctctgagggcattcgcgagtggtgggacttgaaacctggagccccgaagcccaaagccaaccagcaaaagcaggacgacggccggggtctggtgcttcctggctacaagtacctcggacccttcaacggactcgacaagggggagcccgtcaacgcggcggacgcagcggccctcgagcacgacaaggcctacgaccagcagctcaaagcgggtgacaatccgtacctgcggtataaccacgccgacgccgagtttcaggagcgtctgcaagaagatacgtcttttgggggcaacctcgggcgagcagtcttccaggccaagaagcgggttctcgaacctctcggtctggttgaggaaggcgctaagacggctcctggaaagaaacgtccggtagagcagtcgccacaagagccagactcctcctcgggcatcggcaagacaggccagcagcccgctaaaaagagactcaattttggtcagactggcgactcagagtcagtccccgatccacaacctctcggagaacctccagcaacccccgctgctgtgggacctactacaatggcttcaggcggtggcgcaccaatggcagacaataacgaaggcgccgacggagtgggtaatgcctcaggaaattggcattgcgattccacatggctgggcggcagagtcatcaccaccagcacccgcacctgggccttgcccacctacaataaccacctctacaagcaaatctccagtgcttcaacgggggccagcaacgacaaccactacttcggctacagcaccccctgggggtattttgatttcaacagattccactgccacttttcaccacgtgactggcagcgactcatcaacaacaattggggattccggcccaagagactcaacttcaaactcttcaacatccaagtcaaggaggtcacgacgaatgatggcgtcacaaccatcgctaataaccttaccagcacggttcaagtcttctcggactcggagtaccagcttccgtacgtcctcggctctgcgcaccagggctgcctccctccgttcccggcggacgtgttcatgattccgcaatacggctacctgacgctcaacaatggcagccaagccgtgggacgttcatccttttactgcctggaatatttcccttctcagatgctgagaacgggcaacaactctaccttcagctacacctttgaggaagtgcctttccacagcagctacgcgcacagccagagcctggaccggctgatgaatcctctcatcgaccaatacctgtattacctgaacagaactcaaaatcagtccggaagtgcccaaaacaaggacttgctgtttagccgtgggtctccagctggcatgtctgttcagcccaaaaactggctacctggaccctgttatcggcagcagcgcgtttctaaaacaaaaacagacaacaacaacagcaattttacctggactggtgcttcaaaatataacctcaatgggcgtgaatccatcatcaaccctggcactgctatggcctcacacaaagacgacgaagacaagttctttcccatgagcggtgtcatgatttttggaaaagagagcgccggagcttcaaacactgcattggacaatgtcatgattacagacgaagaggaaattaaagccactaaccctgtggccaccgaaagatttgggaccgtggcagtcaatttccagagcagcagcacagaccctgcgaccggagatgtgcatgctatgggaacattacctggcatggtgtggcaagatagagacgtgtacctgcagggtcccatttgggccaaaattcctcacacagatggacactttcacccgtctcctcttatgggcggctttggactcaagaacccgcctcctcagatcctcatcaaaaacacgcctgttcctgcgaatcctccggcggagttttcagctacaaagtttgcttcattcatcacccaatactccacaggacaagtgagtgtggaaattgaatgggagctgcagaaagaaaacagcaagcgctggaatcccgaagtgcagtacacatccaattatgcaaaatctgccaacgttgattttactgtggacaacaatggactttatactgagcctcgccccattggcacccgttaccttacccgtcccctg

SEQ ID NO: 674 - DNA, 2208 bp, Artificial Sequence
  source: /note="Description of Artificial Sequence: Synthetic polynucleotide"
atggctgccgatggttatctcccagattggctcgaggacaacctctctgagggcattcgcgagtggtgggacttgaaacctggagccccgaagcccaaagccaaccagcaaaagcaggacgacggccggggtctggtgcttcctggctacaagtacctcggacccttcaacggactcgacaagggggagcccgtcagcgcggcggacgcagcggccctcgagcacgacaaggcctacgaccagcagctcaaagcgggtgacaatccgtacctgcggtataaccacgccgacgccgagtttcaggagcgtctgcaagaagatacgtcttttgggggcaacctcgggcgagcagtcttccaggccaagaagcgggttctcgaacctctcggtctggttgaggaaggcgctaagacggctcctggaaagaaacgtccggtagagcagtcgccacaagagccagactcctcctcgggcatcggcaagacaggccagcagcccgctaaagagagactcaattttggtcagactggcgactcagagtcagtccccgatccacaacctctcggagaacctccagcaacccccgctgctgtgggacctactacaatggcttcaggcggtggcgcaccaatggcagacaataacgaaggcgccgacggagtgggtaatgcctcaggaaattggcattgcgattccacatggctgggcgacagagtcatcaccaccagcacccgcacctgggccttgcccacctacaataaccacctctacaagcaaatctccagtgcttcaacgggggccagcaacgacaaccactacttcggctacagcaccccctgggggtattttgatttcaacagattccactgccacttttcaccacgtgactggcagcgactcatcaacaacaattggggattccggcccaagagactcaacttcaaactcttcaacatccaagtcaaggaggtcacgacgaatgatggcgtcacaaccatcgccaataaccttaccagcacggttcaagtcttctcggactcggagtaccagcttccgtacgtcctcggctctgcgcaccagggctgcctccctccgttcccggcggacgtgttcatgattccgcaatacggctacctgacgctcaacaatggcagccaagccgtgggacgttcatccttttactgcctggaatatttcccttctcagatgctgagaacgggcaacaactttaccttcagctacacctttgaggaagtgcctttccacagcagctacgcgcacagccagagcctggaccggctgatgaatcctctcatcgaccaatacctgtattacctgaacagaactcaaaatcagtccggaagtgcccaaaacaaggacttgctgtttagccgtgggtctccagctggcatgtctgttcagcccaaaaactggctacctggaccctgttatcggcagcagcgcgtttctaaaacaaaaacagacaacaacaacagcaattttacctggactggtgcttcaaaatataacctcaatgggcgtgaatccatcatcaaccctggcactgctatggcctcacacaaagacgacgaagacaagttctttcccatgagcggtgtcatgatttttggaaaagagagcgccggagcttcaaacactgcattggacaatgtcatgattacagacgaagaggaaattaaagccactaaccctgtggccaccgaaagatttgggaccgtggcagtcaatttccagagcagcagcacagaccctgcgaccggagatgtgcatgctatgggagcattacctggcatggtgtggcaagatagagacgtgtacctgcagggtcccatttgggccaaaattcctcacacagatggacactttcacccgtctcctcttatgggcggctttggactcaagaacccgcctcctcagatcctcatcaaaaacacgcctgttcctgcgaatcctccggcggagttttcagctacaaagtttgcttcattcatcacccaatactccacaggacaagtgagtgtggaaattgaatgggagctgcagaaagaaaacagcaagcgctggaatcccgaagtgcagtacacatccaattatgcaaaatctgccaacgttgattttactgtggacaacaatggactttatactgagcctcgccccattggcacccgttaccttacccgtcccctg

SEQ ID NO: 675 - DNA, 2208 bp, Artificial Sequence
  source: /note="Description of Artificial Sequence: Synthetic polynucleotide"
atggctgccgatggttatcttccagattggctcgaggacaacctctctgagggcattcgcgagtggtgggacttgaaacctggagccccgaagcccaaagccaaccagcaaaagcaggacgacggccggggtctggtgcttcctggctacaagtacctcggacccttcaacggactcgacaagggggagcccgtcaacgcggcggacgcagcggccctcgagcacgacaaggcctacgaccagcagctcaaagcgggtgacaatccgtacctgcggtataaccacgccgacgccgagtttcaggagcgtctgcaagaagatacgtcttttgggggcaacctcgggcgagcagtcttccaggccaagaagcgggttctcgaacctctcggtctggttgaggaaggcgctaagacggctcctggaaagaaacgtccggtagagcagtcgccacaagagccagactcctcctcgggcatcggcaagacaggccagcagcccgctaaaaagagactcaattttggtcagactggcgactcagagtcagtccccgatccacaacctctcggagaacctccagcaacccccgctgctgtgggacctactacaatggcttcaggcggtggcgcaccaatggcagacaataacgaaggcgccgacggagtgggtaatgcctcaggaaattggcattgcgattccacatggctgggcgacagagtcatcaccaccagcacccgcacctgggccttgcccacctacaataaccacctctacaagcaaatctccagtgcttcaacgggggccagcaacgacaaccactacttcggctacagcaccccctgggggtattttgatttcaacagattccactgccacttttcaccacgtgactggcagcgactcatcaacaacaattggggattccggcccaagagactcaacttcaaactcttcaacatccaagtcaaggaggtcacgacgaatgatggcgtcacaaccatcgctaataaccttaccagcacggttcaagtcttctcggactcggagtaccagcttccgtacgtcctcggctctgcgcaccagggctgcctccctccgttcccggcggacgtgttcatgattccgcaatacggctacctgacgctcaacaatggcagccaagccgtgggacgttcatccttttactgcctggaatatttcccttctcagatgctgagaacgggcaacaactttaccttcagctacacctttgaggaagtgcctttccacagcagctacgcgcacagccagagcctggaccggctgatgaatcctctcatcgaccaatacctgtattacctgaacagaactcaaaatcagtccggaagtgcccaaaacaaggacttgctgtttagccgtgggtctccagctggcatgtctgttcagcccaaaaactggctacctggaccctgttatcggcagcagcgcgtttctaaaacaaaaacagacaacaacaacagcaattttacctggactggtgcttcaaaatataacctcaatgggcgtgaatccatcatcaaccctggcactgctatggcctcacacaaagacgacgaagacaagttctttcccatgagcggtgtcatgatttttggaaaagagagcgccggagcttcaaacactgcattggacaatgtcatgattacagacgaaggggaaattaaagccactaaccctgtggccaccgaaagatttgggaccgtggcagtcaatttccagagcagcagcacagaccctgcgaccggagatgtgcatgctatgggagcattacctggcatggtgtggcaagatagagacgtgtacctgcagggtcccatttgggccaaaattcctcacacagatggacactttcacccgtctcctcttatgggcggctttggactcaagaacccgcctcctcagatcctcatcaaaaacacgcctgttcctgcgaatcctccggcggagttttcagctacaaagtttgcttcattcatcacccaatactccacaggacaagtgagtgtggaaattgaatgggagctgcagaaagaaaacagcaagcgctggaatcccgaagtgcagtacacatccaattatgcaaaatctgccaacgttgattttactgtggacaacaatggactttatactgagcctcgccccattggcacccgttaccttacccgtcccctg

SEQ ID NO: 676 - DNA, 2208 bp, Artificial Sequence
  source: /note="Description of Artificial Sequence: Synthetic polynucleotide"
atggctgccgatggttatcttccagattggctcgaggacaacctctctgagggcattcgcgagtggtgggacttgaaacctggagccccgaaacctaaagccaaccagcaaaagcaggacgacggccggggtctggtgcttcctggctacaagtacctcggacccttcaacggactcgacaagggggagcccgtcaacgcggcggacgcagcggccctcgagcacgacaaggcctacgaccagcagctcaaagcgggtgacaatccgtacctgcggtataaccacgccgacgccgagtttcaggagcgtctgcaagaagatacgtcttttgggggcaacctcgggcgagcagtcttccaggccaagaagcgggttctcgaaccttttggtctggttgaggaaggcgctaagacggctcctggaaagaaacgtccggtagagcagtcgccacaagagccagactcctcctcgggcatcggcaagacaggccagcagcccgctaaaaagagactcaattttggtcagactggcgactcagagtcagtccccgacccacaacctctcggagaacctccagcaacccccgctgctgtgggacctactacaatggcttcaggcggtggcgcaccaatggcagacaataacgaaggcgccgacggagtgggtaatgcctcaggaaattggcattgcgattccacatggctgggcgacagagtcatcaccaccagcacccgcacctgggccttgcccacctacaataaccacctctacaagcaaatctccagtgcttcaacgggggccagcaacgacaaccactacttcggctacagcaccccctgggggtattttgatttcaacagattccactgccacttttcaccacgtgactggcagcgactcatcaacaacaattggggattccggcccaagagactcaacttcaagctcttcaacatccaagtcaaggaggtcacgacgaacgatggcgtcacgaccatcgctaataaccttaccagcacggttcaagtcttctcggattcagagtaccaactgccgtacgtcctcggctctgcgcaccagggctgcctccctccgttcccggcggacgtgtttatgattccgcagtacggctacctaacgctcaacaatggcagccaggccgtgggacgttcatccttttactgcccggaatatttcccttctcagatgctgagaacgggcaacaactttaccttcagctacacctttgaggaagtgcctttccacagcagctacgcgcacagccagagcctggaccggctgatgaatcctctcatcgaccaatacctgtattacctgaacagaactcaaaatcagtccggaagtgcccaaaacaaggacttgctgtttagccgtgggtctccagctggcatgtctgttcagcccaaaaactggctacctggaccctgttatcggcagcagcgcgtttctaaaacaaaaacagacaacaacaacagcaattttacctggactggtgcttcaaaatataacctcaatgggcgtgaatccatcatcaaccctggcactgctatggcctcacacaaagacgacaaagacaagttctttcccatgagcggtgtcatgatttttggaaaagagagcgccggagcttcaaatactgcattggacaatgtcatgatcacagatgaagaggaaattaaagccactaaccctgtggccaccgaaagatttgggaccgtggcagtcaatttccagagcagcaacacagaccccgcgaccggagatgtgcatgttatgggagccttacctggcatggtgtggcaagacagagacgtatacctgcagggtcccatttgggccaaaattcctcacacggatggacactttcacccgtctcctctcatgggcggctttggacttaagcacccgcctcctcaaatcctcatcaaaaacacgcctgttcctgcgaatcctccggcagagttttcggctacaaagtttgcttcattcatcacccagtactccacaggacaagtgagtgtggaaattgaatgggagctgcagaaagaaaacagcaagcgctggaatcccgaagtgcagtacacatccaattatgcaaaatctgccaacgttgatttcactgtggacaacaatggactttatactgagcctcgccccattggcacccgttaccttacccgtcccttg

SEQ ID NO: 677 - DNA, 2208 bp, Artificial Sequence
  source: /note="Description of Artificial Sequence: Synthetic polynucleotide"
atggctgccgatggttatcttccagattggctcgaggacaacctctctgagggcattcgcgagtggtgggacttgaaacctggagccccgaaacctaaagccaaccagcaaaagcaggacgacggccggggtctggtgcttcctggctacaagtacctcggacccttcaacggactcgacaagggggagcccgtcaacgcggcggacgcagcggccctcgagcacgacaaggcctacgaccagcagctcaaagcgggtgacaatccgtacctgcggtataaccacgccgacgccgagtttcaggagcgtctacaagaagatacgtcttttgggggcaacctcgggcgagcagtcttccaggccaagaagcgggttctcgaaccttttggtctggttgaggaaggcgctaagacggctcctggaaagaaacgtccggtagagcagtcgccacaagagccagactcctcctcgggcatcggcaagacaggccagcagcccgctaaaaagagactcaattttggtcagactggcgactcagagtcagtccccgacccacaacctctcggagaacctccagcaacccccgctgctgtgggacctactacaatggcttcaggcggtggcgcaccaatggcagacaataacgaaggcgccgacggagtgggtaatgcctcaggaaattggcattgcgattccacatggctgggcgacagagtcatcaccaccagcacccgcacctgggccttgcccacctacaataaccacctctacaagcaaatctccagtgcttcaacgggggccagcaacgacaaccactacttcggctacagcaccccctgggggtattttgatttcaacagattccactgccacttttcaccacgtgactggcagcgactcatcaacaacaattggggattccggcccaagagactcaacttcaagctcttcaacatccaagtcaaggaggtcacgacgaacgatggcgtcacgaccatcgctaataaccttaccagcacggttcaagtcttctcggattcagagtaccaactgccgtacgtcctcggctctgcgcaccagggctgcctccctccgttcccggcggacgtgttcatgattccgcagtacggctacctaacgctcaacaatggcagccaggccgtgggacgttcatccttttactgcctggaatatttcccttctcagatgctgagaacgggcaacaactttaccttcagctacacctttgaggaagtgcctttccacagcagctacgcgcacagccagagcctggaccggctgatgaatcctctcatcgaccaatacctgtattacctgaacagaactcaaaatcagtccggaagtgcccaaaacaaggacttgctgtttagccgtgggtctccagctggcatgtctgttcagcccaaaaactggctacctggaccctgttatcggcagcagcgcgtttctaaaacaaaaacagacaacaacaacagcaattttacctggactggtgcttcaaaatataacctcaatgggcgtgaatccatcatcaaccctggcactgctatggcctcacacaaagacgacaaagacaagttctttcccatgagcggtgtcatgatttttggaaaagagagcgccggagcttcaaatactgcattggacaatgtcatgatcacagatgaagaggaaattaaagccactaaccctgtggccaccgaaagatttgggaccgtggcagtcaatttccagagcagcgacacagaccccgcgaccggagatgtgcatgttatgggagccttacctggcatggtgtggcaagacagagacgtatacctgcagggtcccatttgggccaaaattcctcacacggatggacactttcacccgtctcctctcatgggcggctttggacttaagcacccgcctcctcaaatcctcatcaaaaacacgcctgttcctgcgaatcctccggcagagttttcggctacaaagtttgcttcattcatcacccagtactccacaggacaagtgagtgtggaaattgaatgggagctgcagaaagaaaacagcaagcgctggaatcccgaagtgcagtacacatccaattatgcaaaatctgccaacgttgatttcactgtggacaacaatggactttatactgagcctcgccccattggcacccgttaccttacccgtcccttg

SEQ ID NO: 678 - DNA, 2208 bp, Artificial Sequence
  source: /note="Description of Artificial Sequence: Synthetic polynucleotide"
atggctgccgatggttatcttccagattggctcgaggacaacctctctgagggcattcgcgagtggtgggacttgaaacctggagccccgaaacctaaagccaaccagcaaaagcagggcgacggccggggtctggtgcttcctggctacaagtacctcggacccttcaacggactcgacaagggggagcccgtcaacgcggcggacgcagcggccctcgagcacgacaaggcctacgaccagcagctcaaagcgggtgacaatccgtacctgcggtataaccacgccgacgccgagtttcaggagcgtctgcaagaagatacgtcttttgggggcaacctcgggcgagcagtcttccaggccaagaagcgggttctcgaaccttttggtctggttgaggaaggcgctaagacggctcctggaaagaaacgtccggtagagcagtcgccacaagagccagactcctcctcgggcatcggcaagacaggccagcagcccgctaaaaagagactcaattttggtcagactggcgactcagagtcagtccccgacccacaacctctcggagaacctccagcaacccccgctgctgtgggacctactacaatggcttcaggcggtggcgcaccaatggcagacaataacgaaggcgccgacggagtgggtaatgcctcaggaaattggcattgcgattccacatggctgggcgacagagtcatcaccaccaacactcgcacctgggccttgcccacctacaataaccacctctacaagcaaatctccagtgcttcaacgggggccagcaacgacaaccactacttcggctacagcaccccctgggggtattttgatttcaacagattccactgccacttttcaccacgtgactggcagcgactcatcaacaacaattggggattccggcccaagagactcaacttcaagctcttcaacatccaagtcaaggaggtcacgacgaacgatggcgtcacgaccatcgctaataaccttaccagcacggttcaagtcttctcggattcagagtaccaactgccgtacgtcctcggctctgcgcaccagggctgcctccctccgttcccggcggacgtgttcatgattccgcagtacggctacctaacgctcaacaatggcagccaggccgtgggacgttcatccttttactgcctggaatatttcccttctcagatgctgagaacgggcaacaactttaccttcagctacacctttgaggaagtgcctttccacagcagttacgggcacagccagagcctggaccggctgatgaatcttctcatcgaccaatacctgtattacctgaacagaactcaaaatcagtccggaagtgcccaaaacaaggacttgctgtttagccgtgggtctccagctggcatgtttgttcagcccaaaaactggctacctggaccctgttatcggcagcagcgcgtttctaaaacaaaaacagacaacaacaacagcaattttacctggactggtgcttcaaaatataacctcaatgggcgtgaatccatcatcaaccctggcactgctatggcctcacacaaagacgacgaagacaagttctttcccatgagcggtgtcatgatttttggaaaagagagcgccggagcttcaaatactgcattggacaatgtcatgatcacagatgaagaggaaattaaagccactaaccctgtggccaccgaaagatttgggaccgtggcagtcaatttccagagcagcagcacagaccccgcgaccggagatgtgcatgttatgggagccttacctggcatggtgtggcaagacagagacgtatacctgcagggtcccatttgggccaaaattcctcacacggatggacactttcacccgtctcctctcatgggcggctttggacttaagcacccgcctcctcaaatcctcatcaaaaacacgcctgttcctgcgaatcctccggcagagttttcggctacaaagtttgcttcattcatcacccagtactccacaggacaagtgagtgtggaaattgaatgggagctgcagaaagaaaacagcaagcgctggaatcccgaagtgcagtacacatccaattatgcaaaatctgccaacgttgatttcactgtggacaacaatggactttatactgagcctcgccccattggcacccgttaccttacccgtcccttg

SEQ ID NO: 679 - DNA, 2208 bp, Artificial Sequence
  source: /note="Description of Artificial Sequence: Synthetic polynucleotide"
atggctgccgatggttatcttccagattggctcgaggacaacctctctgagggcattcgcgagtggtgggacttgaaacctggagccccgaaacctaaagccaaccagcaaaagcaggacgacggccggggtctggtgcttcctggctacaagtacctcggacccttcaacggactcgacaagggggagcccgtcaacgcggcggacgcagcggccctcgagcacgacaaggcctacgaccagcagctcaaagcgggtgacaatccgtacctgcggtataaccacgccgacgccgagtttcaggagcgtctgcaagaagatacgtcttttgggggcaacctcgggcgagcagtcttccaggccaagaagcgggttctcgaaccttttggtctggttgaggaaggcgctaagacggctcctggaaagaaacgtccggtagagcagtcgccacaagagccagactcctcctcgggcatcggcaagacaggccagcagcccgctaaaaagagactcaattttggtcagactggcgactcagagtcagtccccgacccacaacctctcggagaacctccagcaacccccgctgctgtgggacctactacaatggcttcaggcggtggcgcaccaatggcagacaataacgaaggcgccgacggagtgggtaatgcctcaggaaattggcattgcgattccacatggctgggcgacagagtcatcaccaccaacacccgcacctgggccttgcccacctacaataaccacctctacaagcaaatctccagtgcttcaacgggggccagcaacgacaaccactacttcggctacagcaccccctgggggtattttgatttcaacagattccactgccacttttcaccacgtgactggcagcgactcatcaacaacaattggggattccggcccaagagactcaacttcaagctcttcaacatccaagtcaaggaggtcacgacgaacgatggcgtcacgaccatcgctaataaccttaccagcacggttcaagtcttctcggattcagagtaccaactgccgtacgtcctcggctctgcgcaccagggctgcctccctccgttcccggcggacgtgttcatgattccgcagtacggctacctaatgctcaacaatggcagccaggccgtgggacgttcatccttttactgcctggaatatttcccttctcagatgctgagaacgggcaacaactttaccttcagctacacctttgaggaagtgcctttccacagcagctacgcgcacagccagagcctggaccggctgatgaatcctctcatcgaccaatacctgtattacctgaacagaactcaaaatcagtccggaagtgcccaaaacaaggacttgctgtttagccgtgggtctccagctggcatgtctgttcagcccaaaaactggctacctggaccctgttatcggcagcagcgcgtttctaaaacaaaaacagacaacaacaacagcaattttacctggactggtgcttcaaaatataacctcaatgggcgtgaatccatcatcaaccctggcactgctatggcctcacacaaagacgacgaagacaagttctttcccatgagcggtgtcatgatttttggaaaagagagcgccggagcttcaaatactgcattggacaatgtcatgatcacagatgaagaggaaattaaagccactaaccctgcggccaccgaaagatttgggaccgtggcagtcaatttccagagcagcagcacagaccccgcgaccggagatgtgcatgttatgggagccttacctggcatggtgtggcaagacagagacgtatacctgcagggtcccatttgggccaaaattcctcacacggatggacactttcacccgtctcctctcatgggcggctttggacttaagcacccgcctcctcaaatcctcatcaaaaacacgcctgttcctgcgaatcctccggcagagttttcggctacaaagtttgcttcattcatcacccagtactccacaggacaagtgagtgtggaaattgaatgggagctgcagaaagaaaacagcaagcgctggaatcccgaagtgcagtacacatccaattatgcaaaatctgccaacgttgatttcactgtggacaacaatggactttatactgagcctcgccccattggcacccgttaccttacccgtcccttg

SEQ ID NO: 680 - DNA, 2208 bp, Artificial Sequence
  source: /note="Description of Artificial Sequence: Synthetic polynucleotide"
atggctgccgatggttatcttccagattggctcgaggacaacctctctgagggcattcgcgagtggtgggacttgaaacctggagccccgaaacctaaagccaaccagcaaaagcaggacgacggccggggtctggtgcttcctggctacaagtacctcggacccttcaacggactcgacaagggggagcccgtcaacgcggcggacgcagcggccctcgagcacgacaaggcctacgaccagcagctcaaagcgggtgacaatccgtacctgcggtataaccacgccgacgccgagtttcaggagcgtctgcaagaagatacgtcttttgggggcaacctcgggcgagcagtcttccaggccaagaagcgggttctcgaaccttttggtctggttgaggaaggcgctaagacggctcctggaaagaaacgtccggtagagcagtcgccacaagagccagactcctcctcgggcatcggcaagacgggccagcagcccgctaaaaagagactcaattttggtcagactggcgactcagagtcagtccccgacccacaacctctcggagaacctccagcaacccccgctgctgtgggacctactacaatggcttcaggcggtggcgcaccaatggcagacaataacgaaggcgccgacggagtgggtaatgcctcaggaaattggcattgcgattccacatggctgggcgacagagtcatcaccaccagcacccgcacctgggccttgcccacctacaataaccacctctacaagcaaatctccagtgcttcaacgggggccagcaacgacaaccactacttcggctacagcaccccctgggggtattttgatttcaacagattccactgccacttttcaccacgtgactggcagcgactcatcaacaacaattggggattccggcccaagagactcaacttcaagctcttcaacatccaagtcaaggaggtcacgacgaacgatggcgtcacgaccatcgctaataaccttaccagcacggttcaagtcttctcggattcagagtaccaactgccgtacgtcctcggctctgcgcaccagggctgcctccctccgttcccggcggacgtgttcatgattccgcagtacggctacctaacgctcaacaatggcagccaggccgtgggacgttcatccttttactgcctggaatatttcccttctcagatgctgagaacgggcaacaactttaccttcagctacacctttgaggaagtgcctttccacagcagctacgcgcacagccagagcctggaccggctgatgaatcctctcatcgaccaatacctgtattacctgaacagaactcaaaatcagtccggaagtgcccaaaacaaggacttgctgtttagccgtgggtctccagctggcatgtccgttcagcccaaaaactggctacctggaccctgttatcggcagcagcgcgtttctaaaacaaaaacagacaacaacaacagcaattttacctggactggtgcttcaaaatataacctcaatgggcgtgaatccatcatcaaccctggcactgctatggcctcacacaaagacgacgaagacaagttctttcccatgagcggtgtcatgatttttggaaaagagagcgccggagcttcaaatactgcattggacaatgtcatgatcacagatgaagaggaaattaaagccactaaccctgtggccaccgaaagatttgggaccgtggcagtcaatttccagagcagcagcacagaccccgcgaccggagatgtgcatgttatgggagccttacctggcatggtgtggcaagacagagacgtatacctgcagggtcccatttgggccaaaattcctcacacggatggacactttcacccgtctcctctcatgggcggctttggacttaagcacccgcctcctcaaatcctcatcaaaaacacgcctgttcctgcgaatcctccggcagagttttcggctacaaagtttgcttcattcatcacccagtactccacaggacaagtgagtgtggaaattgaatgggagctgcagaaagaaaacagcaagcgctggaatcccgaagtgcagtacacatccaattatgcaaaatctgccaacgttgatttcactgtggacaacaatggactttatactgagcctcgccccattggcacccgttaccttacccgtcccttg

SEQ ID NO: 681 - DNA, 2208 bp, Artificial Sequence
  source: /note="Description of Artificial Sequence: Synthetic polynucleotide"
  modified_base (305)..(305): a, c, t, or g
atggctgccgatggttatcttccagattggctcgaggacaacctctctgagggcattcgcgagtggtgggacttgaaacctggagccccgaaacctaaagccaaccagcaaaagcaggacgacggccggggtctggtgcttcctggctacaagtacctcggacccttcaacggactcgacaagggggagcccgtcaacgcggcggacgcagcggccctcgagcacgacaaggcctacgaccagcagctcaaagcgggtgacaatccgtacctgcggtataaccacgccgacgccgagtttcaggngcgtctgcaagaagatacgtcttttgggggcaacctcgggcgagcagtcttccaggccaagaagcgggttctcgaaccttttggtctggttgaggaaggcgctaagacggctcctggaaagaaacgtccggtagagcagtcgccacaagagccagactcctcctcgggcatcggcaagacaggccagcagcccgctaaaaagagactcaattttggtcagactggcgactcagagtcagtccccgacccacaacctctcggagaacctccagcaacccccgctgctgtgggacctactacaatggcttcaggcggtggcgcaccaatggcagacaataacgaaggcgccgacggagtgggtaatgcctcaggaaattggcattgcgattccacatggctgggcggcagagtcatcaccaccagcacccgcacctgggccttgcccacctacaataaccacctctacaagcaaatctccagtgcttcaacgggggccagcaacgacaaccactacttcggccacagcaccccctgggggtattttgatttcaacagattccactgccacttttcaccacgtgactggcagcgactcatcaacaacaattggggattccggcccaagagactcaacttcaagctcttcaacatccaagtcaaggaggtcacgacgaacgatggcgtcacgaccatcgctaataaccttaccagcacggttcaagtcttctcggattcagagtaccaactgccgtacgtcctcggctctgcgcaccagggctgcctccctccgtccccggcggacgtgttcatgattccgcagtacggctacctaacactcaacaatggcagccaggccgtgggacgttcatccttttactgcctggaatatttcccttctcagatgctgagaacgggcaacaactttaccttcagctacacctttgaggaagtgcctttccacagcagctacgcgcacagccagagcctggaccggctgatgaatcctctcatcgaccaatacctgtattacctgaacagaactcaaaatcagtccggaagtgcccaaaacaaggacttgctgtttagccgtgggtctccagctggcatgtctgttcagcccaaaaactggctacctggaccctgttatcggcagcagcgcgtttctaaaacaaaaacagacaacaacaacagcaattttacctggactggtgcttcaaaatataacctcaatgggcgtgaatccatcatcaaccctggcactgctatggcctcacacaaagacgacaaagacaagttctttcccatgagcggtgtcatgatttttggaaaagagagcgccggagcttcaaatactgcattggacaatgtcatgatcacagatgaagaggaaattaaagccactaaccctgtggccaccgaaagatttgggaccgtggcagtcaatttccagagcagcaacacagaccccgcgaccggagatgtgcatgttatgggagccttacctggcatggtgtggcaagacagagacgtatacctgcagggtcccatttgggccaaaattcctcacacggatggacactttcacccgtctcctctcatgggcggctttggacttaagcacccgcctcctcaaatcctcatcaaaaacacgcctgttcctgcgaatcctccggcagagttttcggctacaaagtttgcttcattcatcacccagtactccacaggacaagtgagtgtggaaattgaatgggagctgcagaaagaaaacagcaagcgctggaatcccgaagtgcagtacacatccaattatgcaaaatctgccaacgttgatttcactgtggacaacaatggactttatactgagcctcgccccattggcacccgttaccttacccgtcccttg

SEQ ID NO: 682 - DNA, 2208 bp, Artificial Sequence
  source: /note="Description of Artificial Sequence: Synthetic polynucleotide"
atggctgccgatggttattttccagattggctcgaggacaacctttctgagggcattcgcgagtggtgggacttgaaacctggagccccgaaacctaaagccaaccagcaaaagcaggacgacggccggggtctggtgcttcctggctacaagtacctcggacccttcaacggactcgacaagggggagcccgtcaacgcggcggacgcagcggccctcgagcacgacaaggcctacgaccagcagctcaaagcgggtgacaatccgtacctgcggtataaccacgccgacgccgagtttcaggagcgtctgcaagaagatacgtcttttgggggcaacctcgggcgagcagtcttccaggccaagaagcgggttctcgaaccttttggtctggttgaggaaggcgctaagacggctcctggaaagaaacgtccggtagagcagtcgccacaagagccagactcctcctcgggcatcggcaggacaggccagcagcccgctaaaaagagactcaattttggtcagactggcgactcagagtcagtccccgacccacaacctctcggagaacctccagcgacccccgctgctgtgggacctactacaatggcttcaggcggtggcgcaccaatggcagacaataacgaaggtgccgacggagtgggtaatgcctcaggaaattggcattgcgattccacatggctgggcgacagagtcatcaccaccagcacccgcacctgggccttgcccacctacaataaccacctctacaagcaaatctccagtgcttcaacgggggccagcaacgacaaccactacttcggctacagcaccccctgggggtattttgatttcaacagattccactgccacttttcaccacgtgactggcagcgactcatcaacaacaattggggattccggcccaagagactcaacttcaagctcttcaacatccaagtcaaggaggtcacgacgaacgatggcgtcacgaccatcgctaataaccttaccagcacggttcaagtcttctcggattcagagtaccaactgccgtacgtcctcggctctgcgcaccagggctgcctccctccgttcccggcggacgtgttcatgattccgcagtacggctacctaacgctcaacaatggcagccaggccgtgggacgttcatccttttactgcctggaatatttcccttctcagatgctgagaacgggcaacaactttaccttcagctacacctttgaggaagtgcctttccacagcagctacgcgcacagccagagcctggaccggctgatgaatcctctcatcgaccaatacctgtattacctgaacagaactcaaaatcagtccggaagtgcccaaaacaaggacttgctgtttagccgtgggtctccagctggcatgtctgttcagcccaaaaactggctacctggaccctgttatcggcagcagcgcgtttctaaaacaaaaacagacaacaacaacagcaattttacctggactggtgcttcaaaatataacctcaatgggcgtgaatccatcatcaaccctggcactgctatggcctcacacaaagacgacgaagacaagttctttcccatgagcggtgtcatgatttttggaaaagagagcgccggagcttcaaatactgcattggacaatgtcatgatcacagatgaagaggaaattaaagccactaaccctgtggccaccgaaagatttgggaccgtggcagtcaatttccagagcagcagcccagaccccgcgaccggagatgtgcatgttatgggagccttacctggcatggtgtggcaagacagagacgtatacctgcagggtcccatttgggccaaaattcctcacacggatggacactttcacccgtctcctctcatgggcggctttggacttaagcacccgcctcctcaaatcctcatcaaaaacacgcctgttcctgcgaatcctccggcagagttttcggctacaaagtttgcttcattcatcacccagtactccacaggacaagtgagtgtggaaattgaatgggagctgcagaaagaaaacagcaagcgctggaatcccgaagtgcagtacacatccaattatgcaaaatctgccaacgttgatttcactgtggacaacaatggactttatagtgagcctcgccccattggcacccgttaccttacccgtcccttg

SEQ ID NO: 683 - DNA, 2208 bp, Artificial Sequence
  source: /note="Description of Artificial Sequence: Synthetic polynucleotide"
atggctgccgatggttatcttccagattggctcgaggacaacctctctgagggcattcgcgagtggtgggacttgaaacctggagccccgaaacctaaagccaaccagcaaaagcaggacgacggccggggtctggtgcttcctggctacaagtacctcggacccttcaacggactcgacaagggggagcccgtcaacgcggcggacgcagcggccctcgagcacgacaaggcctacgaccagcagctcaaagcgggtgacaatccgtacctgcggtataaccacgccgacgccgagtttcaggagcgtctgcaagaagatacgtcttttgggggcaacctcgggcgagcagtcttccaggccaagaagcgggttctcgaaccttttggtctggttgaggaaggcgctaagacggctcctggaaagaaacgtccggtagagcagtcgccacaagagccagactcctcctcgggcatcggcaagacaggccagcagcccgctaaaaagagactcaattttggtcagactggcgactcagagtcagtccccgacccacaacctctcggagaacctccagcaacccccgctgctgtgggacctactacaatggcttcaggcggtggcgcaccaatggcagacaataacgaaggcgccgacggagtgggtaatgcctcaggaaattggcattgcgattccacatggctgggcgacagagtcatcaccaccagcacccgcacctgggccttgcccacctacaataaccacctctacaagcaaacctccagtgcttcaacgggggccagcaacgacaaccactacttcggctacagcaccccctgggggtattttgatttcaacagattccactgccacttttcaccacgtgactggcagcgactcatcaacaacaattggggattccggcccaagagactcaacttcaagctcttcaacatccaagtcaaggaggtcacgacgaacgatggcgtcacgaccatcgctaataaccttaccagcacggttcaagtcttctcggattcagagtaccaactgccgtacgtcctcggctctgcgcaccagggctgcctccctccgttcccggcggacgtgttcatgattccgcagtacggctacctaacgctcaacaatggcagccaggccgtgggacgttcatccttttactgcctggaatatttcccttctcagatgctgagaacgggcaacaactttaccttcagctacacctttgaggaagtgcctttccacagcagctacgcgcacagccagagcctggaccggctgatgaatcctctcatcgaccaatacctgtattacctgaacagaactcaaaatcagtccggaagtgcccaaaacaaggacttgctgtttagccgtgggtctccagctggcatgtctgttcagcccaaaaactggctacctggaccctgttatcggcagcagcgcgtttctaaaacaaaaacagactacaacaacagcaattttacctggactggtgcttcaaaatataacctcaatgggcgtgaatccatcatcaaccctggcactgctatggcctcacacaaagacgacgaagacaagttctttcccatgagcggtgtcatgatttttggaaaagagagcgccggagcttcaaatactgcattggacaatgtcatgatcacagatgaagaggaaattaaagccactaaccctgtggccaccgaaagatttgggaccgtggcagtcaatttccagagcagcagcacagaccccgcgaccggagatgtgcatgttatgggagccttacctggcatggtgtggcaagacagagacgtatacctgcagggtcccatttgggccaaaattcctcacacggatggacactttcacccgtctcctctcatgggcggctttggacttaagcacccgcctcctcaaatcctcatcaaaaacacgcctgttcctgcgaatcctccggcagagttttcggctacaaagtttgcttcattcatcacccagtactccacaggacaagtgagtgtggaaattgaatgggagctgcagaaagaaaacagcaagcgctggaatcccgaagtgcagtacacatccaattatgcaaaatctgccaacgttgatttcactgtggacaacaatggactttatactgagcctcgccccattggcacccgttaccttacccgtcccttg

SEQ ID NO: 684 - DNA, 2208 bp, Artificial Sequence
  source: /note="Description of Artificial Sequence: Synthetic polynucleotide"
atggctgccgatggttatcctccagattggctcgaggacaacctctctgagggcattcgcgagtggtgggacttgaaacctggagtcccgaaacctaaagccaaccagcaaaagcaggacgacggccggggtctggtgcttcctggctacaagtacctcggacccttcaacggactcgacaagggggagcccgtcaacgcggcggacgcagcggccctcgagcacgacaaggcctacgaccagcagctcaaagcgggtgacaatccgtacctgcggtataaccacgccgacgccgagtttcaggagcgtctgcaagaagatacgtcttttgggggcaacctcgggcgagcagtcttccaggccaagaagcgggttctcgaaccttttggtctggttgaggaaggcgctaagacggctcctggaaagaaacgtccggtagagcagtcgccacaagagccagactcctcctcgggcatcggcaagacaggccagcagcccgctaaaaagagactcaattttggtcagactggcgactcagagtcagtccccgacccacaacctctcggagaacctccagcaacccccgctgctgtgggacctactacaatggcttcaggcggtggcgcaccaatggcagacaataacgaaggcgccgacggagtgggtaatgcctcaggaaattggcattgcgattccacatggctgggcgacagagtcatcaccaccagcacccgcacctgggccttgcccacctacaataaccacctctacaagcaaatctccagtgcttcaacgggggccagcaacgacaaccactacttcggctacagcaccccctgggggtattttgatttcaacagattccactgccacttttcaccacgtgactggcagcgactcatcaacaacaattggggattccggcccaagagactcaacttcaagctcttcaacatccaagtcaaggaggtcacgacgaacgatggcgtcacgaccatcgctaataaccttaccagcacggttcaagtcttctcggattcagagtaccaactgccgtacgtcctcggctctgcgcaccagggctgcctccctccgttcccggcggacgtgttcatgattccgcagtacggctacctaacgctcaacaatggcagccaggccgtgggacgttcatccttttactgcctggaatatttcccttctcagatgctgagaacgggcaacaactttaccttcagctacacctttgaggaagtgcctttccacagcagctacgcgcacagccagagcctggaccggctgatgaatcctctcatcgaccaatacctgtattacctgaacagaactcaaaatcagtccggaagtgcccaaaacaaggacttgctgtttagccgtgggtctccagctggcatgtctgttcagcccaaaaactggctacctggaccctgttatcggcagcagcgcgtttctaaaacaaaaacagacaacaacaacagcaattttacctggactggtgcttcaaaatataacctcaatgggcgtgaatccatcatcaaccctggcactgctatggcctcacacaaagacgacgaagacaagttctttcccatgagcggtgtcatgatttttggaaaagagagcgccggagcttcaaatactgcattggacaatgtcatgatcacagatgaagaggaaattaaagccactaaccctgtggccaccgaaagatttgggaccgtggcagtcaatttccagagcagcagcacagaccccgcgaccggagatgtgcatgttatgggagccttacctggcatggtgtggcaagacagagacgtatacctgcagggtcccatttgggccaaaattcctcacacggatggacactttcacccgtctcctctcatgggcggctttggacttaagcacccgcctcctcaaatcctcatcaaaaacacgcctgttcctgcgaatcctccggcagagttttcggctacaaagtttgcttcattcatcacccagtactccacaggacaagtgagtgtggaaattgaatgggagctgcagaaagaaaacagcaagcgctggaatcccgaagtgcagtacacatccaattatgcaaaatctgccaacgttgatttcactgtggacaacaatggactttatactgagcctcgccccattggcacccgttaccttacccgtcccttg

SEQ ID NO: 685 - DNA, 2196 bp, Artificial Sequence
  source: /note="Description of Artificial Sequence: Synthetic polynucleotide"
atggctgccgatggttatcttccagattggctcgaggacaacctctctgagggcattcgcgagtggtgggacttgaaacctggagccccgaaacctaaagccaaccagcaaaagcaggacgacggccggggtctggtgcttcctggctacaagtacctcggacccttcaacggactcgacaagggggagcccgtcaacgcggcggacgcagcggccctcgagcacgacaaggcctacgaccagcagctcaaagcgggtgacaatccgtacctgcggtataaccacgccgacgccgagtttcaggagcgtctgcaagaagatacgtcttttgggggcaacctcgggcgagcagtcttccaggccaagaagcgggttctcgaaccttttggtctggttgaggaaggcgctaagacggctcctggaaagaaacgtccggtagagcagtcgccacaagagccagactcctcctcgggcatcggcaagacaggccagcagcccgctaaaaagagactcaattttggtcagactggcgactcagagtcagtccccgacccacaacctctcggagaacctccagcaacccccgctgctgtgggacctactacaatggcttcaggcggtggcgcaccaatggcagacaataacgaaggcgccgacggagtgggtaatgcctcaggaaattggcattgcgattccacatggctgggcgacagagtcatcaccaccagcacccgcacctgggccttgcccacctacaataaccacctctacaagcaaatctccagtgcttcaacgggggccagcaacgacaaccactacttcggctacagcaccccctgggggtattttgatttcaacagattccactgccacttttcaccacgtgactggcagcgactcatcaacaacaattggggattccggcccaagagactcaacttcaagctcttcaacatccaagtcaaggaggtcacgacgaacgatggcgtcacgaccatcgctaataaccttaccagcacggttcaagccttctcggattcagagtaccaactgccgtacgtcctcggctctgcgcaccagggctgcctccctccgttcccggcggacgtgttcatgattccgcagtacggctacctaacgctcaacaatggcagccaggccgtgggacgttcatccttttactgcctggaatatttcccttctcagatgctgagaacgggcaacaactttaccttcagctacacctttgaggaagtgcctttccacagcagctacgcgcacagccagagcctggaccggctgatgaatcctctcatcgacccatacctgtattacctgaacagaactcaaaatcagtccggaagtgcccaaaacaaggacttgctgtttagccgtgggtctccagctggcatgtctgttcagcccaaaaactggctacctggaccctgttatcggcagcagcgcgtttctaaaacaaaaacagacaacaacaacagcaattttacctggactggtgcttcaaaatataacctcaatgggcgtgaatccatcatcaaccctggcactgctatggcctcacacaaagacgacgaagacaagttctttcccatgagcggtgtcatgatttttggaaaagagagcgccggagcttcaaatactgcattggacaatgtcatgatcacagatgaagaggaaattaaagccactaaccctgtggccaccgaaagatttgggaccgtggcagtcaatttccagagcagcagcacagaccccgcgaccggagatgtgcatgttatgggagccttacctggcatggtgtggcaagacagagacgtatacctgcagggtcccatttgggccaaaattcctcacacggatggacactttcacccgtctcctctcatgggcggctttggacttaagcacccgcctcctcaaatcctcatcaaaaacacgcctgttcctgcgaatcctccggcagagttttcggctacaaagtttgcttcattcatcacccagtactccacaggacaagtgagtgtggaaattgaatgggagctgcagaaagaaaacagcaagcgctggaatcccgaagtgcagtacacatccaattatgcaaaatctgccaacgttgatttcactgtggacaacaatggactttatactgagcctcgccccattggcacccgttacctt

SEQ ID NO: 686 - DNA, 2208 bp, Artificial Sequence
  source: /note="Description of Artificial Sequence: Synthetic polynucleotide"
atggctgccgatggttatcttccagattggctcgaggacaacctctctgagggcattcgcgagtggtgggacttgaaacctggagccccgaaacctaaagccaaccagcaaaagcaggacgacggccggggtctggtgcttcctggctacaagtacctcggacccttcaacggactcgacaagggggagcccgtcaacgcggcggacgcagcggccctcgagcacgacaaggcctacgaccagcagctcaaagcgggtgacaatccgtacctgcggtataaccacgccgacgccgagtttcaggagcgtctgcaagaagatacgtcttttgggggcaacctcgggcgagcagtcttccaggccaagaagcgggttctcgaaccttttggtctggttgaggaaggcgctaagacggctcctggaaagaaacgtccggtagagcagtcgccacaagagccagactcctcctcgggcatcggcaagacaggccagcagcccgctaaaaagagactcaattttggtcagactggcgactcagagtcagtccccgacccacaacctctcggagaacctccagcaacccccgctgctgtgggacctactacaatggcttcaggcggtggcgcaccaatggcagacaataacgaaggcgccgacggagtgggtaatgcctcaggaaattggcattgcgattccacatggctgggcgacagagtcatcaccaccagcacccgcacctgggccttgcccacctacaataaccacctctacaagcaaatctccagtgcttcaacgggggccagcaacgacaaccactacttcggctacagcaccccctgggggtattttgatttcaacagattccactgccacttttcaccacgtgactggcagcgactcatcaacaacaattggggattccggcccaagagactcaacttcaagctcttcaacatccaagtcaaggaggtcacgacgaacgatggcgtcacgaccatcgctaataaccttaccagcacggttcaagtcttctcggattcagagtaccaactgccgtacgtcctcggctctgcgcaccagggctgcctccctccgttcccggcggacgtgttcatgattccgcagtacggctacctaacgctcaacaatggcagccaggccgtgggacgttcatccttttactgcctggaatatttcccttctcagatgctgagaacgggcaacaactttaccttcagctacacctttgaggaagtgcctttccacagcagctacgcgcacagccagagcctggaccggctgatgaatcctctcatcgaccaatacctgtattacctgaacagaactcaaaatcagtccggaagtgcccaaaacaaggacttgctgtttagccgtgggtctccagctggcatgtctgttcagcccaaaaactggctacctggaccctgttatcggcagcagcgcgtttctaaaacaaaaacagacaacaacaacagcaattttacctggactggtgcttcaaaatataacctcaatgggcgtgaatccatcatcaaccctggcactgctatggcctcacacaaagacgacgaagacaagttctttcccatgagcggtgtcatgatttttggaaaagagagcgccggagcttcaaatactgcattggacaatgtcatgatcacagatgaagaggaaattaaagccactaaccctgtggccaccgaaagatttgggaccgtggcagtcaatttccagagcagcagcacagaccccgcgaccggagatgtgcatgttatgggagccttacctggcatggtgtggcaagacagagacgtatacctgcagggtcccatttgggccaaaattcctcacacggatggacactctcacccgtctcctctcatgggcggctttggacttaagcacccgcctcctcaaatcctcatcaaaaacacgcctgttcctgcgaatcctccggcagagttttcggctacaaagtttgcttcattcatcacccagtactccacaggacaagtgagtgtggaaattgaatgggagctgcagaaagaaaacagcaagcgctggaatcccgaagtgcagtacacatccaattatgcaaaatctgccaacgttgatttcactgtggacaacaatggactttatactgagcctcgccccattggcacccgttaccttacccgtcccttg

SEQ ID NO: 687 - DNA, 2208 bp, Artificial Sequence
  source: /note="Description of Artificial Sequence: Synthetic polynucleotide"
atggctgccgatggttatcttccagattggctcgaggacaacctctctgagggcattcgcgagtggtgggacttgaaacctggagccccgaaacctaaagccaaccagcaaaagcaggacgacggccggggtctggtgcttcctggctacaagtacctcggacccttcaacggactcgacaagggggagcccgtcaacgcggcggacgcagcggccctcgagcacgacaaggcctacgaccagcagctcaaagcgggtgacaatccgtacctgcggtataaccacgccgacgccgagtttcaggagcgtctgcaagaagatacgtcttttgggggcaacctcgggcgagcagtcttccaggccaagaagcgggttctcgaaccttttggtctggttgaggaaggcgctaagacggctcctggaaagaaacgtccggtagagcagtcgccacaagagccagactcctcctcgggcatcggcaagacaggccagcagcccgctaaaaagagactcaattttggtcagactggcgactcagagtcagtccccgacccacaacctctcggagaacctccagcaacccccgctgctgtgggacctactacaatggcttcaggcggtggcgcaccaatggcagacaataacgaaggcgccgacggagtgggtaatgcctcaggaaattggcattgcgattccacatggctgggcgacagagtcatcaccaccagcacccgcacctgggccttgcccacctacaataaccacctctacaagcaaatctccagtgcttcaacgggggccagcaacgacaaccactacttcggctacagcaccccctgggggtattttgatttcaacagattccactgccacttttcaccacgtgactggcagcgactcatcaacaacaattggggattccggcccaagagactcaacttcaagctcttcaacatccaagtcaaggaggtcacgacgaacgatggcgtcacgaccatcgctaataaccttaccagcacggttcaagtcttctcggattcagagtaccaactgccgtacgtcctcggctctgcgcaccagggctgcctccctccgttcccggcggacgtgttcatgattccgcagtacggctacctaacgctcaacaatggcagccaggccgtgggacgttcatccttttactgcctggaatatttcccttctcagatgctgagaacgggcaacaactttaccttcagctacacctttgaggaagtgcctttccacagcagctacgcgcacagccagagcctggaccggctgatgaatcctctcatcgacctatacctgtattacctgaacagaactcaaaatcagtccggaagtgcccaaaacaaggacttgctgtttagccgtgggtctccagctggcatgtctgttcagcccaaaaactggctacctggaccctgttatcggcagcagcgcgtttctaaaacaaaaacagacaacaacaacagcaattttacctggactggtgcttcaaaatataacctcaatgggcgtgaatccatcatcaaccctggcactgctatggcctcacacaaagacgacgaagacaagttctttcccatgagcggtgtcatgatttttggaaaagagagcgccggaacttcaaatactgcattggacaatgtcatgatcacagatgaagaggaaattaaagccactaaccctgtggccaccgaaagatttgggaccgtggcagtcaatttccagagcagcagcacagaccccgcgaccggagatgtgcatgttatgggagccttacctggcatggtgtggcaagacagagacgtatacctgcagggtcccatttgggccaaaattcctcacacggatggacactttcacccgtctcctctcatgggcggctttggacttaagcacccgcctcctcaaatcctcatcaaaaacacgcctgttcctgcgaatcctccggcagagttttcggctacaaagtttgcttcattcatcacccagtactccacaggacaagtgagtgtggaaattgaatgggagctgcagaaagaaaacagcaagcgctggaatcccgaagtgcagtacacatccaattatgcaaaatctgccaacgttgatttcactgtggacaacaatggactttatactgagcctcgccccattggcacccgttaccttacccgtcccttg

SEQ ID NO: 688 - DNA, 2208 bp, Artificial Sequence
  source: /note="Description of Artificial Sequence: Synthetic polynucleotide"
atggctgccgatggttatcttccagattggctcgaggacagcctctctgagggcattcgcgagtggtgggacttgaaacctggagccccgaaacctaaagccaaccagcaaaagcaggacgacggccggggtctggtgcttcctggctacaagtacctcggacccttcaacggactcgacaagggggagcccgtcaacgcggcggacgcagcggccctcgagcacgacaaggcctacgaccagcagctcaaagcgggtgacaatccgtacctgcggtataaccacgccgacgccgagtttcaggagcgtctgcaagaagatacgtcttttgggggcaacctcgggcgagcagtcttccaggccaagaagcgggttctcgaaccttttggtctggttgaggaaggcgctaagacggctcctggaaagaaacgtccggtagagcagtcgccacaagagccagactcctcctcgggcatcggcaagacaggccagcagcccgctaaaaagagactcaattttggtcagactggcgactcagagtcagtccccgacccacaacctctcggagaacctccagcaacccccgctgctgtgggacctactacgatggcttcaggcggtggcgcaccaatggcagacaataacgaaggcgccgacggagtgggtaatgcctcaggaaattggcattgcgattccacatggctgggcgacagagtcatcaccaccagcacccgcacctgggccttgcccacctacaataaccacctctacaagcaaatctccagtgcttcaacgggggccagcaacgacaaccactacttcggctacagcaccccctgggggtattttgatttcaacagattccactgccacttttcaccacgtgactggcagcgactcatcaacaacaattggggattccggcccaagagactcaacttcaagctcttcaacatccaagtcaaggaggtcacgacgaacgatggcgtcacgaccatcgctaataaccttaccagcacggttcaagtcttctcggattcagagtaccaactgccgtacgtcctcggctctgcgcaccagggctgcctccctccgttcccggcggacgtgttcatgattccgcagtacggctacctaacgcccaacaatggcagccaggccgtgggacgttcatccttttactgcctggaatatttcccttctcagatgctgagaacgggcaacaactttaccttcagctacacctttgaggaagtgcctttccacagcagctacgcgcacagccagagcctggaccggctgatgaatcctctcatcgaccaataccagtattacctgaacagaactcaaaatcagtccggaagtgcccaaaacaaggacttgctgtttagccgtgggtctccagctggcatgtctgttcagcccaaaaactggctacctggaccctgttatcggcagcagcgcgtttctaaaacaaaaacagacaacaacaacagcaattttacctggactggtgcttcaaaatataacctcaatgggcgtgaatccatcatcaaccctggcactgctatggcctcacacaaagacgacgaagacaagttctttcccatgagcggtgtcatgatttttggaaaagagagcgccggagcttcaaatactgcattggacaatgtcatgatcacagatgaagaggaaattaaagccactaaccctgtggccaccgaaagatttgggaccgtggcagtcaatttccagagcagcagcacagaccccgcgaccggagatgtgcatgttatgggagccttacctggcatggtgtggcaagacagagacgtatacctgcagggtcccatttgggccaaaattcctcacacggatggacactttcacccgtctcctctcatgggcggctttggacttaagcacccgcctcctcaaatcctcatcaaaaacacgcctgttcctgcgaatcctccggcagagttttcggctacaaagtttgcttcattcatcacccagtactccacaggacaagtgagtgtggaaattgaatgggagctgcagaaagaaaacagcaagcgctggaatcccgaagtgcagtacacatccaattatgcaaaatctgccaacgttgatttcactgtggacaacaatggactttatactgagcctcgccccattggcacccgttaccttacccgtcccttg

SEQ ID NO: 689 - DNA, 2208 bp, Artificial Sequence; identical to SEQ ID NO: 680
  source: /note="Description of Artificial Sequence: Synthetic polynucleotide"

SEQ ID NO: 690 - DNA, 2205 bp, Artificial Sequence
  source: /note="Description of Artificial Sequence: Synthetic polynucleotide"
atggctgccgatggttatcttccagattggctcgaggacactctctctgaaggaataagacagtggtggaagctcaaacctggcccaccaccaccaaagcccgcagagcggcataaggacgacagcaggggtcttgtgcttcctgggtacaagtacctcggacccttcaacggactcgacaagggagagccggtcaacgaggcagacgccgcggccctcgagcacgacaaagcctacgaccggcagctcgacagcggagacaacccgtacctcaagtacaaccacgccgacgcggagtttcaggagcgccttaaagaagatacgtcttttgggggcaacctcggacgagcagtcttccaggcgaaaaagagggttcttgaacctctgggcctggttgaggaacctgttaagacggctccgggaaaaaagaggccggtagagcactctcctgtggagccagactcctcctcgggaaccggaaaggcgggccagcagcctgcaagaaaaagattgaattttggtcagactggagacgcagactcagtacctgacccccagcctctcggacagccaccagcagccccctctggtctgggaactaatacgatggctacaggcagtggcgcaccaatggcagacaataacgagggcgccgacggagtgggtaattcctcgggaaattggcattgcgattccacatggatgggcgacagagtcatcaccaccagcacccgaacctgggccctgcccacctacaacaaccacctctacaaacaaatttccagccaatcaggagcctcgaacgacaatcactactttggctacagcaccccttgggggtattttgacttcaacagattccactgccacttttcaccacgtgactggcaaagactcatcaacaacaactggggattccgacccaagagactcaacttcaagctctttaacattcaagtcaaagaggtcacgcagaatgacggtacgacgacgattgccaataaccttaccagcacggttcaggtgtttactgactcggagtaccagctcccgtacgtcctcggctcggcgcatcaaggatgcctcccgccgttcccagcagacgtcttcatggtgccacagtatggatacctcaccctgaacaacgggagtcaggcagtaggacgctcttcattttactgcctggagtactttccttctcagatgctgcgtaccggaaacaactttaccttcagctacacttttgaggacgttcctttccacagcagctacgctcacagccagagtctggaccgtctcatgaatcctctcatcgaccagtacctgtattacttgagcagaacaaacactccaagtggaaccaccacgcagtcaaggcttcagttttctcgggccggagcgagtgacattcgggaccagtctaggaactggcttcctggaccctgttaccgccagcagcgagtatcaaagacatctgcggataacaacaacagtgaatactcgtggactggagctaccaagtaccacctcaatggcagagactctctggtgaatccgggcccggccatggcaagccacaaggacgatgaagaaaagttttttcctcagagcggggttctcatctttgggaagcaaggctcagagaaaacaaatgtggacattgaaaaggtcatgattacagacgaagaggaaatcaggacaaccaatcccgtggctacggagcagtatggttctgtatctaccaacctccagagaggcaacagacaagcagctaccgcagatgtcaacacacaaggcgttcttccaggcatggtctggcaggacagagatgtgtaccttcaggggcccatctgggcaaagattccacacacggacggacattttcacccctctcccctcatgggtggattcggacttaaacaccctcctccacagattctcatcaagaacaccccggtacctgcgaatccttcgaccaccttcagtgcggcaaagtttgcttccttcatcacacagtactccacgggacaggtcagcgtggagatcgagtgggagctgcagaaggaaaacagcaaacgctggaatcccgaaattcagtacacttccaactacaacaagtctgttaatgtggactttactgtggacactaatggcgtgtattcagagcctcgccccattggcaccagatacctgactcgtaatctg

SEQ ID NO: 691 - protein, 736 aa, Artificial Sequence
  source: /note="Description of Artificial Sequence: Synthetic polypeptide"
MAADGYLPDWLEDNLSEGIREWWALKPGAPQPKANQQHQDNARGLVLPDYKYLGPGNGLDKGEPVNAADVAALEHDKAYDQQLKAGDNPYLKYNHADAEFQERLKEDTSFGGNLGRAVFQAKKRLLEPLGLVEEAAKTAPGKKRPVEQSPQEPDSSAGIGKSGAQPAKKRLNFGQTGDTESVPDPQPIGEPPAAPSGVGSLTMASGGGAPVADNNEGADGVGSSSGNWHCDSQWLGDGVITTSTRTWALPTYNNHLYKQISNSTSGGSSNDNAYFGYSTPWGYFDFNRFHCHFSPRDWQRLINNNWGFRPKRLNFKLFNIQVKEVTDNNGVKTIANNLTSTVQVFTDSDYQLPYVLGSAHEGCLPPFPADVFMIPQYGYLTLNDGSQAVGRSSFYCLEYFPSQMLRTGNNFQFSYEFENVPFHSSYAHSQSLDRLMNPLIDQYLHYLPKTINGSGQNQQTLKFSVAGPSNMAVQGRNYIPGPSYRQQRVSTTVTQNNNSEFAWPGASSWALNGRNSLMNPGPAMASYKEGEDSFFPLSGSLIFGKQGTGRDNVDADKVMITNEEEIKTTNPVATESYGQVATNHQSAQAQAQTGWVQNQGILPGMVWQDRDVYLQGPIWAKIPHTDGNFHPSPLMGGFGMKHPPPQTLIKNTPVPADPPTAFNKDKLNSFITQYSTGQVSVEIEWELQKENSKRWNPEIQYTSNYYKSNNVEFAVNTEGVYSEPRPIGTRYLTRNL

SEQ ID NO: 692 - protein, 736 aa, Artificial Sequence
  source: /note="Description of Artificial Sequence: Synthetic polypeptide"
MAADGYLPDWLEDNLSEGIREWWALKPGAPQPKANQQHQDNARGLVLPGYKYLGPGNGLDKGEPVNAADAAALEHDKAYDQQLKAGDNPYLKYNHADAEFQERLKEDTSFGGNLGRAVFQAKRRLLEPLGLVEEAAKTAPGKKRPVEQSPQEPDSSAGIGKSGAQPAKKRLNFGQTGDTESVPDPQPIGEPPAAPSGVGSLTMASGGGAPVADNNEGADGVGSSSGNWHCDSQWLGDRVITTSTRTWALPTYNNHLYKQISNSTSGGSSNDNAYFGYSTPWGYFDFNRFHCHFSPRDWQRLINNNWGFRPKRLNFKLFNIQIKEVTDNNGVKTIANNLTSTVQVFTDLDYQLPYVLGSAHEGCLPPFPADVFMIPQYGYLTLNDGSQAVGRSSFYCLEYFPSQMLRTGNNFQFSYEFENVPFHSSYAHSQSLDRLMNPLIDQYLHYLSKTINGSGQNQQTLKFSVAGPSNMAVQGRNYIPGPSYRQQRVSTTVTQNNNSEFAWPGASSWALNGRNSLMNPGPAMASYKEGEDSFFPLSGSLIFGKQGTGRDNVDADKVMITNEEEIKTTNPVATESYGQVATNHQSAQAQAQTGWVQNQGILPGMVWQDRDVYLQGPIWAKIPHTDGNFHPSPLMGGFGMKHPPPQTLIKNTPVPADPPTAFNKDKLNSFITQYSTGQVSVEIEWELQKENSKRWNPEIQYTSNYYKSNNVEFAVNTEGVYSEPRPIGTRYLTRNL

SEQ ID NO: 693 - protein, 736 aa, Artificial Sequence
  source: /note="Description of Artificial Sequence: Synthetic polypeptide"
MAADGYLPDWLEDNLSEGIREWWALKPGAPQPKANQQHQDNARGLVLPGYKYLGPGNGLDKGEPVSAADAAALEHDKAYDQQLKAGDNPYLKYNHADAEFQERLKEDTSFGGNLGRAVFQAKKRLLEPLGLVEEAAKTAPGKKRPVEQSPQEPDSSAGIGKSGAQPAKKRLNFGQTGDTESVSDPQPIGEPPAAPSGVGSLTMASGGGAPVADNNEGADGVGSSSGNWHCDSQWLGDRVITTSTRTWALPTYNNHLYKQISNSTSGGSSNDNAYFGYSTPWGYFDFNRFHCHFSPRDWQRLINNNWGFRPKRLNFKLFNIQVKEVTDNNGVKTIANNLTSTVQVFTDSDYQLPYVLGSAHEGCLPPSPADVFMIPQYGYLTLNDGSQAVGRSSFYCLEYFPSQMLRTGNNFQFSYEFENVPFHSSYAHSQSLDRLMNPLIDQYLHYLSKTINGSGQNQQTLKFSVAGPSNMAVQGRNYIPGPSYRQQRVSTTVTQNNNSEFAWPGASSWALNGRNSLMNPGPAMASYKEGEDSFFPLSGSLIFGKQGTGRDDVDADKVIITNEEEIKTTNPVATESYGQVATNHQSAQAQAQTGWVQNQGILPGMVWQDRDVYLQGPIWAKIPHTDGNFHPSPLMGGFGMKHPPPQTLIKNTPVPADPPTAFNKDKLNSFITQYSTGQVSVEIEWELQKENSKRWNPEIQYTSNYYKSNNVEFAVNTEGVYSEPRPIGTRYLTRNL

SEQ ID NO: 694 - protein, 736 aa, Artificial Sequence
  source: /note="Description of Artificial Sequence: Synthetic polypeptide"
MAADGYLPDWLEDNLSEGIREWWALKPGAPQPKANQQHQDNARGLVLPGYKYLGPGNGLDKGEPVNAADAAALEHDKAYDQQLKAGDNPYLKYNHAGAEFQERLKEDTSFGGNLGRAVFQAKKRLLEPLGLVEEAAKTAPGKKRPVEQSPQEPDSSAGIGKSGAQPAKKRLNFGQTGDTESVPDPQPIGEPPAAPSGVGSLTMASGGGAPVADNNEGAGGVGSSSGNWHCDSQWLGDRVVTTSTRTWALPTYNNHLYKQISNSTSGGSSNDNAYFGYSTPWGYFDFNRFHCHFSPRDWQRLINNNWGFRPKRLNFKLFNIQVKEVTDNNGVKTIANNLTSTVQVFTDSDYQLPYVLGSAHGGCLPPFPADVFMIPQYGYLTLNDGSQAVGRSSFYCLEYFPSQMLRTGNNFQFSYEFENVPFHSSYAHSQSLDRLMNPLIDQYLHYLSKTINGSGQNQQTLKFSVAGPSNMAVQGRSYIPGPSYRQQRVSTTVTQNNNSEFAWPGASSWALNGRNSLMNPGPAMASYKEGEDSFFPLSGSLIFGKQGTGRDNVDADKVMITNEEEIKTTNPVATESYGQVATNHQSAQAQAQTGWVQNQGILPGMVWQDRDVYLQGPIWAKIPHTDGNFHPSPLMGGFGMKHPPPQTLIKNTPVPADPPTAFNKDKLNSFITQYSTGQVSVEIEWELQKENSKRWNPEIQYTSNYYKSNNVEFAVNTEGVYSEPRPIGTRYLTRNL

SEQ ID NO: 695 - protein, 736 aa, Artificial Sequence
  source: /note="Description of Artificial Sequence: Synthetic polypeptide"
MAADGYLPDWLEDNLSEGIREWWALKPGAPQPKANQQHQDNARGLVLPGYKYLGPGNGLDKGEPVNAADAAALEHDKAYDQQLKAGDNPYLKYNHADAEFQERLKEDTSFGGNLGRAVFQAKKRLLEPLGLVEEAAKTAPGKKRPVEQSPQEPDSSAGIGKSGAQPAKKRLNFGQTGDTESVPDPQPIGEPPAAPSGVGSLTMASGGGAPVADNNEGADGVGSSSGNWHCDSQWLGDRVVTTSTRTWALPTYNNHLYKQISNSTSGGSSNDNAYFGYSTPWGYFDFNRFHCHFSPRDWQRLINNNWGFRPKRLNFKLFNIQVKEVTDNNGVKTIANNLTSTVQVFTDSDYQLPYVLGSAHEGCLPPFPADVFMIPQYGYLTLNDGSQAVGRSSFYCLEYFPSQMLRTGNNFQFSYEFENVPFHSSHAHSQSLDRLMNPLIDQYLHYLSKTINGSGQNQQTLKFSVAGHSNMAVQGRNYIPGPSYRQQRVSTTVTQNNNSEFAWPGASSWALNGRNSLMNPGPAMASYKEGEDSFFPLSGSLIFGKQGTGRDNVDADKVMITNEEEIKTTNPVATESYGQVATNHQSAQAQAQTGWVQNQGILPGMVWQDRDVYLQGPIWAKIPHTDGNFHPSPLMGGFGMKHPPPQTLIKNTPVPADPPTAFNKDKLNSFITQYSTGQVSVEIGWELQKENSKRWNPEIQYTSNYYKSNNVEFAVNTEGVYSEPRPIGTRYLTRNL

SEQ ID NO: 696 - protein, 736 aa, Artificial Sequence
  source: /note="Description of Artificial Sequence: Synthetic polypeptide"
MAADGYLPDWLEDNLSEGIREWWALKPGAPQPKANQQHQDNARGLVLPGYKYLGPGNGLDKGEPVNAADAAALEHDKAYDQQLKAGDNPYLKYNHADAEFQERLKEDTSFGGNLGRAVFQAKKRLLEPLGLVEEAAKTAPGKKRPVEQSPQEPDSSAGIGKSGAQPAKKRLNFGQTGDTESVPDPQPIGEPPAAPSGVGSLTMASGGGAPVADNNEGADGVGSSSGNWHCDSQWLGDRVITTSTRTWALPTYNNRLYKQISNSTSGGSSNDNAYFGYSTPWGYFDFNRFHCHFSPRDWQRLINNNWGFRPKRLNFKPFNIQVKEVTDNNGVKTIANNLTSTVQVFTDSDYQLPYVLGSAHEGCLPPFPADVFMIPQYGYLTLNDGSQAVGRSSFYCLEYFPSQMLRTGNNFQFSYEFENVPFHSSYAHSQSLDRLMNPLIDQYLHYLSKTINGSGQNQQTLKFSVAGPSNMAVQGRNYIPGPSYRQQRVSTTVTQNNNSEFAWPGASSWALNGRNSLMNPGPAMASYKEGEDSFFPLSGSLIFGKQGTGRDNVDADKVMITNEEEIKTTNPVATESYGQVATNHQSAQAQAQTGWVQNQGILPGMVWQDRDVYLQGPIWAKIPHTDGNFHPSPLMGGFGMKHPPPQTLIKNTPVPADPPTAFNKDKLNSFITQYSTGQVSVEIEWELQKENSKRWNPEIQYTSNYYKSNNVEFAVNTEGVYSEPRPIGTRYLTRNL

SEQ ID NO: 697 - protein, 736 aa, Artificial Sequence
  source: /note="Description of Artificial Sequence: Synthetic polypeptide"
MAADGYLPDWLEDNLSEGIREWWALKPGAPQPKANQQHQDNARGLVLPGYKYLGPGNGLDKGEPVNAADAAALEHDKAYDQQLKAGDNPYLKYNHADAEFQERLKEDTSFGGNLGRAVFQAKKRLLEPLGLVEEAAKTAPGKKRPVEQSPQEPDSSAGIGKSGAQPAKKRLNFGQTGDTESVPDPQPIGEPPAAPSGVGSLTMASGGGAPVADNNEGADGVGSSSGNWHCDSQWLGDRVITTSTRTWALPTYNNHLYKQISNSTSGGSSNDNAYFGYSTPWGYFDFNRFHCHFSPRDWQRLINNNWGFRPKRLNFKLFNIQVKEVTDNNGVKTIANNLTSTVQVFTDSDYQLPYVLGSAHEGCLPPFPADVFMIPQYGYLTLNDGSQAVGRSSFYCLEYFPSQMLRTGNNFQFSYEFENVPFHSSYAHSQSLDRLMNPLIDQYLHYLSKTINGSGQNQQTLKFSVAGPSNMAVQGRNYIPGPSYRQQRVSTTVTQNNNSEFAWPGASSWALNGRNSLMNPGPAMASYKEGEDSFFPLSGSLIFGKQGTGRDNVDADKVMITNEEEIKTTNPVATESYGQVATNHQSAQAQAQTGWVQNQGILPGMVWQDRDVYLQGPIWAKIPHTDGNFHPSPLMGGFGMKHPPPQTLIKNTPVPADPPTAFNKDKLNSFITQYSTGQVSVEIEWELQKENSKRWNPEIQYTSNYYKSNNVEFAVNTEGVYSEPRPIGTRYLTRNL

SEQ ID NO: 698 - protein, 736 aa, Artificial Sequence; identical to SEQ ID NO: 697
  source: /note="Description of Artificial Sequence: Synthetic polypeptide"

SEQ ID NO: 699 - protein, 736 aa, Artificial Sequence
  source: /note="Description of Artificial Sequence: Synthetic polypeptide"
MAADGYLPDWLEDNLSEGIREWWDLKPGAPKPKANQQKQDDGRGLVLPGYKYLGPFNGLDKGEPVNAADAAALEHDKAYDQQLKAGDNPYLRYNHADAEFQERLQEDTSFGGNLGRAVFQAKKRVLEPFGLVEEGAKTAPGKKRPVEQSPQEPDSSSGIGKSGQQPAKKRLNFGQTGDSESVPDPQPLGEPPATPAALGPTTMASGGGAPMADNNEGADGVGNASGNWHCDSTWLGDRVITTSTRTWALPTYNNHLYKQISSASTGASNDNHYFGYSTPWGYFDFNRFHCHFSPRDWQRLINNNWGFRPKRLNFKLFNIQVKEVTTNDGVTTIANNLTSTVQVFSDSEYQLPYVLGSAHQGCLPPFPADVFMIPQYGYLTLNNGSKAVGRSSFYCLEYFPSQMLRTGNNFTFSYTFEEVPFHSSYAHSQSLDRLMNPLIDQYLYYLNRTQNQSGSAQNKDLLFSRGSPAGMSVQPKNWLPGPCYRQQRVSKTKTDNNNSNFTWTGASKYNLNGRESIINPGTAMASHKDDEDKFFPMSGVMIFGKESAGASNTALDNVMITDEEEIKATNPVATERFGTVAVNFQSSSTDPATGDVHVMGALPGMVWQDRDVYLQGPIWAKIPHTDGHFHPSPLMGGFGLKHPPPQILIKNTPVPANPPAEFSATKFASFITQYSTGQVSVEIEWELQKENSKRWNPEVQYTSNYAKSANVDFTVDNNGLYTEPRPIGTRYLTRPL

SEQ ID NO: 700 - protein, 736 aa, Artificial Sequence
  source: /note="Description of Artificial Sequence: Synthetic polypeptide"
MAADGYLPDWLEDNLSEGIREWWDLKPGAPKPKANQQKQDDGRGLVLPGYKYLGPFNGLDKGEPVNAADAAALEHDKAYDQQLKAGDNPYLRYNHADAEFQERLQEDTSFGGNLGRAVFQAKKRVLEPLGLVEEGAKTAPGKKRPVEQSPQEPDSSSGIGKTGQQPAKKRLNFGQTGDSESVPDPQPLGEPPATPAAVGPTTMASGGGAPMADNNEGADGVGNASGNWHCDSTWLGDRVITTSTRTWALPTYNNHLYKQISSTSTGASNDNHYFGYSTPWGYFDFNRFHCHFSPRDWQRLINNNWGFRPKRLNFKLFNIQVKEVTTNDGVTTIANNLTSTVQVFSDSEYQLPYVLGSAHQGCLPPFPADVFMIPQYGYLTLNNGSQAVGRSSFYCLEYFPSQMLRTGNNFTFSYTFEEVPFHSSYAHSQSLDRLMNPLIDQYLYYLNRTQNQSGSAQNKDLLFSRGSPAGMSVQPKNWLPGPCYRQQRVSKTKTDNNNSNFTWTGASKYNLNGRESIINPGTAVASHKDDEDKFFPMSGVMIFGKESAGASNTALDNVMITDEEEIKATNPVATERFGTVAVNFQSSSTDPATGDVHAMGALPGMVWQDRDVYLQGPIWAKIPHTDGHFHPSPLMGGFGLKNPPPQILIKNTPVPANPPAEFSATKFASFITQYSTGQVSVEIEWELQKENSKRWNPEVQYTSNYAKSANVDFTVDNNGLYTEPRPIGTRYLTRPL

SEQ ID NO: 701 - protein, 736 aa, Artificial Sequence
  source: /note="Description of Artificial Sequence: Synthetic polypeptide"
MAADGYLPDWLEDNLSEGIREWWALKPGAPQPKANQQHQDNARGLVLPGYKYLGPGNGLDKGEPVNAADAAALEHDKAYDQQLKAGDNPYLKYNHADAEFQERLKEDTSFGGNLGRAVFQAKKRLLEPLGLVEEAAKTAPGKKRPVEQSPQEPDSSAGIGKSGAQPAKKRLNFGQTGDTESVPDPQPIGEPPAAPSGVGSLTMASGGGAPVADNNEGADGVGSSSGNWHCDSQWLGDRVITTSTRTWALPTYNNHLYKQISNSTSGGSSNDNAYFGYSTPWGYFDFNRFHCHFSPRDWQRLINNNWGFRPKRLNFKLFNIQVKEVTDNNGVKTIANNLTSTVQVFTDSDYQLPYVLGSAHEGCLPPFPADVFMIPQYGYLTLNDGSQAVGRSSFYCLEYFPSQMLRTGNNFQFGYEFENVPFHSSYAHSQSLDRLMNPLIDQYLYYLSKTINGSGQNQQTLKFSVAGPSNMAVQGRNYIPGPSYRQQRVSTTVTQNNNSEFAWPGASSWALNGRNSLMNPGPAMASHKEGEDRFFPLSGSLIFGKQGTGRDNVDADKVMITNEEEIKTTNPVATESYGQVATNHQSAQAQAQTGWVQNQGILPGMVWQDRDVYLQGPIWAKIPHTDGNFHPSPLMGGFGMKHPPPQILIKNTPVPADPPTAFNKDKLNSFITQYSTGQVSVEIEWELQKENSKRWDPEIQYTSNYYKSNNVEFAVNTEGVYSEPRPIGTRYLTRNL

SEQ ID NO: 702 - protein, 736 aa, Artificial Sequence
  source: /note="Description of Artificial Sequence: Synthetic polypeptide"
MAADGYLPDWLEDNLSEGIREWWALKPGAPQPKANQQHQDNARGLVLPGYKYLGPGNGLDKGEPVNAADAAALEHDKAYDQQLKAGDNPYLKYNHADAEFQERLKEDTSFGGNLGRAVFQAKKRLLEPLGLVEEAAKTAPGKKRPVEQSPQEPDSSAGIGKSGAQPAKKRLNFGQTGDTESVPDPQPIGEPPAAPSGVGSLTMASGGGAPVADNNEGADGVGSSSGNWHCDSQWLGDRVITTSTRTWALPTYNNHLYKQISNSTSGGSSNDNAYFGYSTPWGYFDFNRFHCRFSPRDWQRLINNNWGFRPKRLNFKLFNIQVKEVTDNNGVKTIANNLTSTVQVFTDSDYQLPYVLGSAHEGCLPPFPADVFMIPQYGYLTLNDGSQAVGRSSFYCLEYFPSQMLRTGNNFQFSYEFENVPFHSSYAHSQSLDRLMNPLIDQYLYYLSKTINGSGQNQQTLKFSVAGPSNMAVQGRNYIPGPSYRQQRVSTTVTQNNNSEFAWPGASSWALNGRNSLMNPGPAMASHKEGEDRFFPLSGSLIFGKQGTGRDNVDADKVMITNEEEIKTTNPVATESYGQVATNHQSAQAQAQTGWVQNQGILPGMVWQDRDVYLQGPIWAKIPHTDGNFHPSPLMGGFGMKHPPPQILIKNAPVPADPPTAFNKDKLNSFITQYSTGQVSVEIEWELQKENSKRWNPEIQYTSNYYKSNNVEFAVNTEGVYSEPRPIGTRYLTRNL

SEQ ID NO: 703 - protein, 736 aa, Artificial Sequence
  source: /note="Description of Artificial Sequence: Synthetic polypeptide"
MAADGYLPDWLEDNLSEGIREWWALKPGAPQPKANQQHQDNARGLVLPGYKYLGPGNGLDKGEPVSAADAAALEHDKAYDQQLKAGDNPYLKYNHADAEFQERLKEDTSFGGNLGRAVFQAKKRLLEPLGLVEEAAKTAPGKKRPVEQSPQEPDSSAGIGKSGAQPAKKRLNFGQTGDTESVPDPQPIGEPPAAPSGVGSLTMASGGGAPVADNNEGADGVGSSSGNWHCDSQWLGDRVITTSTRTWALPTYNNHLYKQISNSTSGGSSNDNAYFGYSTPWGYFDFNRFHCHFSPRDWQRLINNNWGFRPKRLNFKLFNIQVKEVTDNNGVKTIANNLTSTVQVFTDSDYQLPYVLGSAHEGCLPPFPADVFMIPQYGYLTLNDGSQAVGRSSFYCLEYFPSQMLRTGNNFQFSYEFENVPFHSSYAHSQSLDRLMNPLIDQYLYYLSKTINGSGQNQQTLKFSVAGPSNMAVQGRNYIPGPSYRQQRVSTTVTQNNNSEFAWPGASSWALNGRNSLMNPGPAMASHKEGEDRFFPLSGSLIFGKQGTGRDNVDADKVMITNEEEIKTTNPVATESYGQVATNHQSAQAQAQTGWVQNQGILPGMVWQDRDVYLQGPIWAKIPHTDGNFHPSPLMGGFGMKHPPPQILIKNTPVPADPPTAFNKDKLNSFITQYSTGQVSVEIEWELQKENSKRWNPEIQYTSNYYKSNNVEFAVNTEGVYSEPRPIGTRYLTRNL

SEQ ID NO: 704 - protein, 736 aa, Artificial Sequence
  source: /note="Description of Artificial Sequence: Synthetic polypeptide"
MAADGYLPDWLEDNLSEGIREWWALKPGAPQPKANQQHQDNARGLVLPGYKYLGPGNGLDKGEPVNAADAAALEHDKAYDQQLKAGDNPYLKYNHADAEFQERLKEDTSFGGNLGRAVFQAKKRLLEPLGLVEEAAKTAPGKKRPVEQSPQEPDSSAGIGKSGAQPAKKRLNFGQTGDTESVPDPQPIGEPPAAPSGVGSLTMASGGGAPVADNNEGADGVGSSSGNWHCDSQWLGDRVITTSTRTWALPTYNNHLYKQISNSTSGGSSNDNAYFGYSTPWGYFDFNRFHCHFSPRDWQRLINNNWGFRPKRLNFKLFNIQVKEVTDNNGVKTIANNLTSTVQVFTDSDYQLPYVLGSAHEGCLPPFPADVFMIPQYGYLTLNDGSQAVGRSSFYCLEYFPSQMLRTGNNFQFSYEFENVPFHSSYAHSQSLDRLMNPLIDQYLYYLSKTINGSGQNQQTLKFSVAGPSNTAVQGRNYIPGPSYRQQRVSTTVTQNNNSEFAWPGASSWALNGRNSLMNPGPAMASHKEGEDRFFPLSGSLIFGKQGTGRDNVDADKVMITNEEEIKTTNPVATESYGQVATNHQSAQAQAQTGWVQNQGILPGMVWQDRDVYLQGPIWAKIPHTDGNFHPSPLMGGFGMKHPPPQILIKNTPVPADPPTAFNKDKLNSFITQYSTGQVSVEIEWELQKENSKRWNPEIQYTSNYYKSNNVEFAVNTEGVYSEPRPIGTRYLTRNL

SEQ ID NO: 705 - protein, 736 aa, Artificial Sequence
  source: /note="Description of Artificial Sequence: Synthetic polypeptide"
MAADGYLPDWLEDNLSEGIREWWALKPGAPQPKANQQHQDNARGLVLPGYKYLGPGNGLDKGEPVNAADAAALEHDKAYDQQLKAGDNPYLKYNHADAEFQERLKEDTSFGGNLGRAVFQAKKRLLEPLGLVEEAAKTAPGKKRPVEQSPQEPDSSAGIGKSGAQPAKKRLNFGQTGDTESVPDPQPIGEPPAAPSGVGSLTMASGGGAPVADNNEGADGVGSSSGNWHCDSQWLGDRVITTSTRTWALPTYNNHLYKQISNSTSGGSSNDNAYFGYSTPWGYFDFNRFHCHFSPRDWQRLINNNWGFRPKRLNFKLFNIQVKEVTDNNGVKTIANNLTSTVQVFTDSDYQLPYVLGSAHEGCLPPFPADVFMIPQYGYLTLNDGSQAVGRSSFYCLEYFPSQMLRTGSNFQFSYEFENVPFHSSYAHSQSLDRLMNPLIDQYLYYLSKTINGSGQNQQTLKFSVAGPSNMAVQGRNYIPGPSYRQQRVSTTVTQNNNSEFAWPGASSWALNGRNSLMNPGPAMASHKEGEDRFFPLSGSLIFGKQGTGRDNVDADKVMITNEEEIKTTNPAATESYGQVATNHQSAQAQAQTGWVQNQGILPGMVWQDRDVYLQGPIWAKIPHTDGNFHPSPLMGGFGMKHPPPQILIKNTPVPADPPTAFNKDKLNSFITQYSTGQVSVEIEWELQKENSKRWNPEIQHTSNYYKSNNVEFAVNTEGVYSEPRPIGTRYLTRNL

SEQ ID NO: 706 - protein, 736 aa, Artificial Sequence
  source: /note="Description of Artificial Sequence: Synthetic polypeptide"
MAADGYLPDWLEDNLSEGIREWWALKPGAPQPKANQQHQDNARGLVLPGYKYLGPGNGLDKGEPVNAADAAALEHDKAYDQQLKAGDNPYLKYNHADAEFQERLKEDTSFGGNLGRAVFQAKKRLLEPLGLVEEAAKTAPGKKRPVEQSPQEPDSSAGIGKSGAQPAKKRLNFGQTGDTESVPDPQPIGEPPAAPSGVGSLTMASGGGAPVADNNEGADGVGSSSGNWHCDSQWLGDRVITTSTRTWALPTYNNHLYKQISNSTSGGSSNDNAYFGYSTPWGYFDFNRFHCHFSPRDWQRLINNNWGFRPKRLNFRLFNIQVKEVTDNNGVKTIANNLTSTVQVFTDSDYQLPYVLGSAHEGCLPPFPADVFMIPQYGYLTLNDGSQAVGRSSFYCLEYFPSQMLRTGNNFQFSYEFENVPFHSSYAHSQSLDRLMNPLIDQYLYYLSKTINGSGQNQQTLKFSVAGPSNMAVQGRNYIPGPSYRQQRVSTTVTQNNNSEFAWPGASSWALNGRNSLMNPGPAMASHKEGEDRFFPLSGSLIFGKQGTGRDNVDADKVMITNEEEIKTTNPVATESYGQVATNHQSAQAQAQTGWVQSQGILPGMVWQDRDVYLQGPIWAKIPHTDGNFHPSPLMGGFGMKHPPPQILIKNTPVPADPPTAFNKDKLNSFITQYSTGQVSVEIEWELQKENSKRWNPEIQYTSNYYKSNNVEFAVNTEGVYSEPRPIGTRYLTRNL

SEQ ID NO: 707 - protein, 735 aa, Artificial Sequence
  source: /note="Description of Artificial Sequence: Synthetic polypeptide"
MAADGYLPDWLEDNLSEGIREWWALKPGAPQPKANQQHQDNARGLVLPGYKYLGPGNGLDKGEPVNAADAAALEHDKAYDQQLKAGDNPYLKYNHADAEFQERLKEDTSFGGNLGRAVFQAKKRLLEPLGLVEEAAKTAPGKKRPVEQSPQEPDSSAGIGKSGAQPAKKRLNFGQTGDTESVPDPQPIGEPPAAPSGVGSLTMASGGGAPVADNNEGADGVGSSSGNWHCDSQWLGDRVITTSTRTWALPTYNNHLYKQISNSTSGGSSNDNAYFGYSTPWRYFDFNRFHCHFSPRDWQRLINNWGFRPKRLNFKLFNIQVKEVTDNNGVKTIANNLTSTVQAFTDSDYQLPYVLGSAHEGCLPPFPADVFMIPQYGYLTLNDGSQAVGRSSFYCLEYFPSQMLRTGNNFQFSYEFENVPFHSSYAHSQSLDRLMNPLIDQYLYYLSKTINGSGQNQQTLKFSVAGPSNMAVQGRNYIPGPSYRQQRVSTTVTQNNNSEFAWPGASSWALNGRNSLMNPGPAMASHKEGEDRFFPLSGSLIFGKQGTGRDNVDADKVMITNEEEIKTTNPVATESYGQVATNHQSAQAQAQTGWVQNQGILPGMVWQDRDVYLQGPIWAKIPHTDGNFHPSPLMGGFGMKHPPPQILIKNTPVPADPPTAFNKDELNSFITQYSTGQVSVEIEWELQKENSKRWNPEIQYTSNYYKSNNVEFAVNTEGVYSEPRPIGTRYLTRNL

SEQ ID NO: 708 - protein, 735 aa, Artificial Sequence
  source: /note="Description of Artificial Sequence: Synthetic polypeptide"
MAADGYLPDWLEDNLSEGIREWWALKPGAPQPKANQQHQDNARGLVLPGYKYLGPGNGLDKGEPVNAADAAALEHDKAYDQQLKAGDNPYLKYNHADAEFQERLKEDTSFGGNLGRAVFQDKKRLLEPLGLVEEAAKTAPGKKRPVEQSPQEPDSSAGIGKSGAQPAKKRLNFGQTGDTESVPDPQPIGEPPAAPSGVGSLTMASGGGAPVADNNEGADGVGSSSGNWHCDSQWLGDRVITTSTRTWALPTYNNHLYKQISNSTSGGSSNDNAYFGYSTPWGYFDFNRFHCHFSPRDWQRLINNWGFRPKRLNFKLFNIQVKEVTDNNGVKTIANNLTSTVQVFTDSDYQLPYVLGSAHEGCLPPFPADVFMIPQYGYLTLNDGSQAVGRSSFYCLEYFPSQMLRTGNNFQFSYEFENVPFHSSYAHSQSLDRLMNPLIDQYLYYLSKTINGSGQNQQTLKFSVAGPSNMAVQGRNYIPGPSYRQQRVSTTVTQNNNSEFAWPGASSWALNGRNSLMNPGPAMASHKEGEDRFFPLSGSLIFGKQGTGRDNVDADKVMITNEEEIKTTNPVATESYGQVATNHQSAQAQAQTGWVQNQGILPGMVWQDRDVYLQGPIWAKIPHTDGNFHPSPLMGGFGMKHPPPQILIKNTPVPADPPTAFNKDKLNSFITQYSTGQVSVEIEWELQKENSKRWNPEIQYTSNYYKSNNVEFAVNTEGVYSEPRPIGTRYLTRNL

SEQ ID NO: 709 - protein, 736 aa, Artificial Sequence
  source: /note="Description of Artificial Sequence: Synthetic polypeptide"
MAADGYLPDWLEDNLSEGIREWWALKPGAPQPKANQQHQDNARGLVLPGYKYLGPGNGLDKGEPVNAADAAALEHDKAYDQQLKAGDNPYLKYNHADAEFQERLKEDTSFGGNLGRAVFQAKKRLLEPLGLVEEAAKTAPGKKRPVEQSPQEPDSSAGIGKSGAQPAKKRLNFGQTGDTESVPDPQPIGEPPAAPSGVGSLTMASGGGAPVADNNEGADGVGSSSGNWHCDSQWLGDRAITTSTRTWALPTYNNHLYKQISNSTSGGSSNDNAYFGYSTPWGYFDFNRFHCHFSPRDWQRLINNNWGFRPKRLNFKLFNIQVKEVTDNNGVKTIANNLTSTVQVFTDSDYQLPYVLGSAHEGCLPPFPADVFMIPQYGYLTLNDGSQAVGRSSFYCLEYFPSQMLRTGNNFQFSYEFENVPFHSSYAHSQSLDRLMNPLIDQYLYYLSKTINGSGQNQQTLKFSVAGPSNMAVQGRNYIPGPSYRQQRVSTTVTQNNNSEFAWPGASSWALNGRNSLMNPGPAMASHKEGEDRFFPLSGSLIFGKQGTGRDNVDADKVMTTNEEEIKTTNPVATESYGQVATNHQSAQAQAQTGWVQNQGILPGMVWQDRDVYLQGPIWAKIPHTDGNFHPSPLMGGFGMKHPPPQILIKNTPVPADPPTAFNKDKLNSFITQYSTGQVSVEIEWELQKENSKRWNPEIQYTSNYYKSNNVEFAVNTEGVYSEPRPIGTRYLTRNL

SEQ ID NO: 710 - protein, 736 aa, Artificial Sequence
  source: /note="Description of Artificial Sequence: Synthetic polypeptide"
MAADGYLPDWLEDNLSEGIREWWALKPGAPQPKANQQHQDNARGLVLPGYKYLGPGNGLDKGEPVNAADAAALEHDKAYDQQLKAGDNPYLKYNHADAEFQERLKEDTSFGGNLGRAVFQTKKRLLEPLGLVEEAAKTAPGKKRPVEQSPQEPGSSAGIGKSGAQPAKKRLNFGQTGDTESVPDPQPIGEPPAAPSGVGSLTMASGGGAPVADNNEGADGVGSSSGNWHCDSQWLGDRVITTSTRTWALPTYNNHLYKQISNSTSGGSSNDNAYFGYSTPWGYFDFNRFHCHFSPRDWQRLINNNWGFRPKRLNFKLFNIQVKEVTDNNGVKTIANNLTSTVQVFTDSDYQLPYVLGSAHEGCLPPFPADVFMIPQYGYLTLNDGSQAVGRSSFYCLEYFPSQMLRTGNNFQFSYEFENVPFHSSYAHSQSLDRLMNPLIDQYLHYLSKTINGSGQNQQTLKFSVAGPSNMAVQGRNYIPGPSYRQQRVSTTVTQNNNSEFAWPGASSWALNGRNSLMNPGPAMASHKEGEDRFFPLSGSLIFGKQGTGRDNVDADKVMITNEEEIKTTNPVATESYGQVATNHQSAQAQAQTGWVQNQGILPGMVWQDRDVYLQGPIWAKIPHTDGNFHPSPLMGGFGMKHPPPQILIKNTPVPADPPTAFNKDKLNSFITQYSTGQVSVEIEWELQKENSKRWNPEIQYTSNYYKSNNVEFAVNTEGVYSEPRPIGTRYLTRNL

SEQ ID NO: 711 - protein, 736 aa, Artificial Sequence
  source: /note="Description of Artificial Sequence: Synthetic polypeptide"
MAADGYFPDWLEDNLSEGIREWWALKPGAPQPKANQQHQDNARGLVLPGYKYLGPGNGLDKGEPVNAADAAALEHDKAYDQQLKAGDNPYLKYNHADAEFQERLKEDTSFGGNLGRAVFQAKKRLLEPLGLVEEAAKTAPGKKRPVEQSPQEPDSSAGIGKSGAQPAKKRLNFGQTGDTESVPDPQPIGESPAAPSGVGSLTMASGGGAPVADNNEGADGVGSSSGNWHCDSQWLGDRVITTSTRTWALPTYNNHLYKQISNSTSGGSSNDNAYFGYSTPWGYFDFNRFHCHFSPRDWQRLINNNWGFRPKRLNFKLFNIQVKEVTDNNGVKTIANNLTSTVQVFTDSDYQLPYVLGSAHEGCLPPFPADVFMIPQYGYLTLNDGSQAVGRSSFYCLEYLPSQMLRTGNNFQFSYEFENVPFHSSYAHSQSLDRLMNPLIDQYLHYLSKTINGSGQNQQTLKFSVAGPSNMAVQGRNYIPGPSYRQQRVSTTVTQNNNSEFAWPGASSWALNGRNSLMNPGPAVASHKEGEDRFFPLSGSLIFGKQGTGRDNVDADKVMITNEEEIKTTNPVATESYGQVATNHQSAQAQAQTGWVQNQGILPGMVWQDRDVYLQGPIWAKIPHTDGNFHPSPLMGGFGMKHPPPQILIKNTPVPADPPTAFNKDKLNSFITQYSTGQVSVEIEWELQKENSKRWNPEIQYTSNYYKSNNVEFAVNTEGVYSEPRPIGTRYLTRNL

SEQ ID NO: 712 - protein, 736 aa, Artificial Sequence
  source: /note="Description of Artificial Sequence: Synthetic polypeptide"
MAADGYLPDWLEDNLSEGIREWWALKPGAPQPKANQQHQDNARGLVLPGYKYLGPGNGLDKGEPVNAADAAALEHDKAYDQQLKAGDNPYLKYNHADAEFQERLKEDTSFGGNLGRAVFQAKKRLLEPLGPVEEAAKTAPGKKRPVEQSPQEPDSSAGIGKSGAQPAKKRLNFGQTGDTESVPDPQPIGEPPAAPSGVGSLTMASGGGAPVADNNEGADGVGSSSGNWHCDSQWLGDRVITTSTRTWALPTYNNHLYKQISNSTSGGSSNDNAYFGYSTPWGYFDFNRFHCHFSPRDWQRLINNNWGFRPKRLNFKLFNIQVKEVTDNNGVKTIANNLTSTVQVFTDSDYQLPYVLGSAHEGCLPPFPADVFMIPQYGYLTLNDGSQAVGRSSFYCLEYFPSQMLRTGNNFQFSYEFENVPFHSSYAHSQSLDRLMNPLIDQYLYYLSKTINGSGQNQQTLKFSVAGPSNMAVQGRNYIPGPSYRQQRVSTTVTQNNNSEFAWPGASSWALNGRNSLMNPGPAMASHKEGEDRFFPLSGSLIFGKQGTGRDNVDADKVMITNEEEIKTTNPVATESYGQAATNHQSAQAQAQTGWVQNQGILPGMVWQDRDVYLQGPIWAKIPHTDGNFHPSPLMGGFGMKHPPPQILIKNTPVPADPPTAFNKDKLNSFITQYSTGQVSVEIEWELQKENSKRWNPEIQYTSNYYKSNNVEFAVNTEGVYSEPRPIGTRYLTRNL

SEQ ID NO: 713 - protein, 736 aa, Artificial Sequence
  source: /note="Description of Artificial Sequence: Synthetic polypeptide"
MAADGYLPDWLEDNLSEGIREWWALKPGAPQPKANQQHQDNARGLVLPGYKYLGPGNGLDKGEPVNAADAAALEHDKAYDQQLKAGDNPYLKYNHADAEFQERLKEDTSFGGNLGRAVFQAKKRLLEPLGPVEEAAKTAPGKKRPVEQSPQEPDSSAGIGKSGAQPAKKRLNFGQTGDTESVPDPQPIGEPPAAPSGVGSLTMASGGGAPVADNNEGADGVGSSSGNWHCDSQWLGDRVITTSTRTWALPTYNNHLYKQISNSTSGGSSNDNAYFGYSTPWGYFDFNRFHCHFSPRDWRRLINNNWGFRPKRLNFKLFNIQVKEVTDNNGVKTIANNLTSTVQVFTDSDYQLPYVLGSAHEGCLPPFPADVFMIPQYGYLTLNDGSQAVGRSSFYCLEYFPSQMLRTGNNFQFSYEFENVPFHSSYAHSQSLDRLMNPLIDQYLYYLSKTINGSGQNQQTLKFSVAGPSNMAVQGRNYIPGPSYRQQRVSTTVTQNNNSEFAWPGASSWALNGRNSLMNPGPAMASHKEGEDRFFPLSGSLIFGKQGTGRDNVDADKVMITNEEEIKTTNPVATESYGQVATNHQSAQAQAQTGWVQNQGILPGMVWQDRDVYLQGPIWAKIPHTDGNFHPSPLMGGFGMKHPPPQILIKNTPVPADPPTAFNKDKLNSFITQYSTGQVSVEIEWELQKENSKRWNPEIQYTSNYYKSNNVEFAVNTEGVYSEPRPIGTRYLTRNL

SEQ ID NO: 714 - protein, 736 aa, Artificial Sequence
  source: /note="Description of Artificial Sequence: Synthetic polypeptide"
MAADGYLPDWLEDNLSEGIREWWALKPGAPQPKANQQHQDNARGLVLPGYKYLGPGNGLDKGEPVNAADAAALEHDKAYDQQLKAGDNLYLKYNHADAEFQERLKEDTSFGGNLGRAVFQAKKRLLEPLGLVEEAAKTAPGKKRPVEQSPQEPDSSAGIGKSGAQPAKKRLNFGQTGDTESVPDPQPIGEPPAAPSGVGSLTMASGGGAPVADNNEGADGVGSSSGNWHCDSQWLGDRVITTSTRTWALPTYNNHLYKQISNSTSGGSSNDNAYFGYSTPWGYFDFNRFHCHFSPRDWQRLINNNWGFRPKRLNFKLFNIQVKEVTDNNGVKTIANNLTSTVQVFTDSDYQLPYVLGSAHEGCLPPFPADVFMIPQYGYLTLNDGSQAVGRSSFYCLEYFPSQMLRTGNNFQFSYEFENVPFHSSYAHSQSLDRLMNPLIDQYLHYLSKTINGSGQNQQTLKFSVAGPSNMAVQGRNYIPGPSYRQQRVSTTVTQNNNSEFAWPGASSWALNGRNSLMNPGPAMASHKEGEDRFFPLSGSLIFGKQGTGRDNVDADKVMITNEEEIKTTNPVATESYGQVATNHQSAQAQAQTGWVQNQGILPGMVWQDRDVYLQGPIWAKIPHTDGNFHPSPLMGGFGMKHPPPQILIKNTPVPADPPTAFNKDKLNSFITQYSTGQVSVEIEWELQKENSKRWNPEIQYTSNYYKSNNVEFAVNTEGVYSEPRPIGTRYLTRNL

SEQ ID NO: 715 - protein, 736 aa, Artificial Sequence
  source: /note="Description of Artificial Sequence: Synthetic polypeptide"
MAADGYLPDWLEDNLSEGIREWWALKPGAPQPKANQQHQDNARGLVLPGYKYLGPGNGLDKGEPVNAADAAALEHDKAYDQQLKAGDNPYLKYNHADAEFQERLKEDTSFGGNLGRAVFQAKKRLLEPLGLVEEAAKTAPGKKRPVEQSPQEPDSSAGIGKSGAQPAKKRLNFGQTGDTESVPDPQPIGEPPAAPSGVGSLTMASGGGAPVADNNEGADGVGSSSGNWHCDSQWLGDRVITTSTRTWALPTYNNHLYKQISNSTSGGSSNDNAYFGYSTPWGYFDFNRFHCHFSPRDWQRLINNNWGFRPKRLNFKLFNIQVKEVTDNNGVKTIANNLTSTVQVFTDSDYQLPYVLGSAHEGCLPPFPADVFMIPQYGYLTLNDGSQAVGRSSFYCLEYFPSQMLRTGNNFQFSYEFENVPFHSSYAHSQSLDRLMNPLIDQYLHYLSKTINGSGQNQQTLKFSVAGPSNMAVQGRNYIPGPSYRQQRVSTTVTQNNNSEFAWPGASSWALNGRNSLMNPGPAMASHKEGEDRFFPLSGSLIFGKQGTGRDNVDADKVMITNEEEIKTTNPVATESYGQVATNHQSAQAQAQTGWVQNQGILPGMVWQDRDVYLQGPIWAKIPHTDGNFHPSPLMGGFGMKHPPPQILIKNTPVPADPPTAFNKDKLNSFITQYSTGQVSVEIEWELQKENSKRWNPEIQYTSNYYKSNNVEFAVNTEGVYSEPRPIGTRYLTRNL

SEQ ID NO: 716 - protein, 736 aa, Artificial Sequence
  source: /note="Description of Artificial Sequence: Synthetic polypeptide"
  MOD_RES (442)..(442): Any naturally occurring amino acid
MAADGYLPDWLEDNLSEGIREWWALKPGAPQPKANQQHQDNARGLVLPGYKYLGPGNGLDKGEPVNAADAAALEHDKAYDQQLKAGDNPYLKYNHADAEFQERLKEDTSFGGNLGRAVFQAKKRLLEPLGLVEEAAKTAPGKKRPVEQSPQEPDSSAGIGKSGAQPAKKRLNFGQTGDTESVPDPQPIGEPPAAPSGVGSLTMASGGGAPVADNNEGADGVGSSSGNWHCDSQWLGDRVITTSTRTWALPTYNNHLYKQISTSTSGGSSNDNAYFGYSTPWGYFDFNRFHCHFSPRDWQRLINNNWGFRPKRLNFKLFNIQVKEVTDNNGVKTIANNLTSTVQVFTDSDYQLPYVLGSAHEGCLPPFPADVFMIPQYGYLTLNDGSQAVGRSSFYCLEYFPSQMLRTGNNFQFSYEFENVPFHSSYAHSQSLDRLMNPLIDXYLHYLSKTINGSGQNQQTLKFSVAGPSNMAVQGRNYIPGPSYRQQRVSTTVTQNNNSEFAWPGASSWALNGRNSLMNPGPAMASHKEGEDRFFPLSGSLIFGKQGTGRDNVDADKVMITNEEEIKTTNPVATESYGQVATNHQSAQAQAQTGWVQNQGILPDMVWQDRDVYLQGPIWAKIPHTDGNFHPSPLMGGFGMKHPPPQILIKNTPVPADPPTAFNKDKLNSFITQYSTGQVSVEIEWELQKENSKRWNPEIQYTSNYYKSNNVEFAVNTEGVYSEPRPIGTRYLTRNL

SEQ ID NO: 717 - protein, 736 aa, Artificial Sequence; identical to SEQ ID NO: 697
  source: /note="Description of Artificial Sequence: Synthetic polypeptide"

SEQ ID NO: 718 - protein, 736 aa, Artificial Sequence; identical to SEQ ID NO: 701
  source: /note="Description of Artificial Sequence: Synthetic polypeptide"

SEQ ID NO: 719 - protein, 736 aa, Artificial Sequence
  source: /note="Description of Artificial Sequence: Synthetic polypeptide"
MAADGYLPDWLEDNLSEGIREWWALKPGAPQPRANQQHQDNARGLVLPGYKYLGPGNGLDKGEPVNAADAAALEHDKAYDQQLKAGDNPYLKYNHADAEFQERLKEDTSFGGNLGRAVFQAKKRLLEPLGLVEEAAKTAPGKKRPVEQSPQEPDSSAGIGKSGAQPAKKRLNFGQTGDTESVPDPQPIGEPPAAPSGVGSLTMASGGGAPVADNNEGADGVGSSSGNWHCDSQWLGDRVITTSTRTWALPTYNNHLYKQISNSTSGGSSNDNAYFGYSTPWGYFDFNRFHCHFSPRDWQRLINNNWGFRPKRLNFKLFNIQVKEVTDNNGVKTIANNLTSTVQVFTDSDCQLPYVLGSAHEGCLPPFPADVFMIPQYGYLTLNDGSQAVGRSSFYCLEYFPSQMLRTGNNFQFSYEFENVPFHSSYAHSQSLDRLTNPLIDQYLYYLSKTINGSGQNQQTLKFSVAGPSNMAVQGRNYIPGPSYRQQRVSTTVTQNNNSEFAWPGASSWALNGRNSLMNPGPAMASHKEGEDRFFPLSGSLIFGKQGTGRDNVDADKVMITNEEEIKTTNPVATESHGQVATNHQSAQAQAQTGWVQNQGILPGMVWQDRDVYLQGPIWAKIPHTDGNFHPSPLMGGFGMKHPPPQILIKNTPVPADPPTAFNKDKLNSFITQYSTGQVSVEIEWELQKENSKRWNPEIQYTSNYYKSNNVEFAVNTEGVYSEPRPIGTRYLTRNL

SEQ ID NO: 720 - protein, 736 aa, Artificial Sequence
  source: /note="Description of Artificial Sequence: Synthetic polypeptide"
MAADGYLPDWLEDNLSEGIREWWALKPGAPQPKANQQHQDNARGLVLPGYKYLGPGNGLDKGEPVNAADAAALEHDKAYDQQLKAGDNPYLKYNHADAEFQERLKEDTSFGGNLGRAVFQAKKRLLEPLGLVEEAAKTAPGKKRPVEQSPQEPDSSAGIGKSGAQPAKKRLNFGQTGDTESVPDPQPIGEPPAAPSGVGSLTMASGGGAPVADNNEGADGVGSSSGNWHCDSQWLGDRVITTSTRTWALPTYNNHLYKQISNSTSGGSSNDNAYFGYSTPWGYFDFNRFHCHFSPRDWQRLINNNWGFRPKRLNFKLFNIQVKEVTDNNGVKTIANNLTSTVQVFTDSDYQLPYVLGSAHEGCLPPFPADVFMIPQYGYLTLNDGSQAVGRSSFYCLEYFPSQMLRTGNNFQFSYEFENVPFHSSYAHSQSLDRLMNPPIDQYLYYLSKTINGSGQNQQTLKFSVAGPSNMAVQGRNYIPGPSYRQQRVSTTVTQNNNSEFAWPGASSWALNGRNSLMNPGPAMASHKEGEDRFFPLSGSLIFGKQGTGRDNVDADKVMITNEEEIKTTNPVATESYGQVATNHQSAQAQAQTGWVQNQGILPGMVWQDRDVYLQGPIWAKIPHTDGNFHPSPLMGGFGMKHPPPQILIKNTPVPADPPTAFNKDKLNSFITQYSTGQVSVEIEWELQKENSKRWNPEIQYTSNYYKSNNVEFAVNTEGVYGEPRPIGTRYLTRNL

SEQ ID NO: 721 - protein, 736 aa, Artificial Sequence
  source: /note="Description of Artificial Sequence: Synthetic polypeptide"
MAADGYLPDWLEDNLSEGIREWWALKPGAPQPKANQQHQDNARGLVLPGYKYLGPGNGLDKGEPVNAADAAALEHDKAYDQQLKAGDNPYLKYNHADAEFQERLKEDTSFGGNLGRAVFQAKKRLLEPLGLVEEAAKTAPGKKRPVEQSPQEPDSSAGIGKSGAQPAKKRLNFGQTGDTESVPDPQPIGEPPAAPSGVGSLTMASGGGAPVADNNEGADGVGSSSGNWHCDSQWLGDRVITTSTRTWALPTYNNHLYKQISNSTSGGSSNDNAYFGYSTPWGYFDFNRFHCHFSPRDRQRLINNNWGFRPKRLNFKLFNIQVKEVTDNNGVKTIANNLTSTVQVFTDSDYQLPYVLGSAHEGCLPPFPADVFMIPQYGYLTLNDGSQAVGRSSFYCLEYFPSQMLRTGNNFQFSYEFENVPFHSSYAHSQSLDRLMNPLIDQYLYYLSKTINGSGQNQQTLKFSVAGPSNMAVQGRNYIPGPSYRQQRVSTTVTQNNNSEFAWPGASSWALNGRNSLMNPGPAMASHKEGEDRFFPLSGSLIFGKQGTGRDNVDADKVMITNEEEIKTTNPVATESYGQVATNHQSAQAQAQTGWVQNQGILPGMVWQDRDVYLQGPIWAKIPHTDGNFHPSPLMGGFGMKHPPPQILIKNTPVPADPPTAFNKDKLNSFITQYSTGQVSVEIEWELQKENSKRWNPEIQYTSNYYKSNNVEFAVNTEGVYSEPRPIGTRYLTRNL

SEQ ID NO: 722 - protein, 736 aa, Artificial Sequence
  source: /note="Description of Artificial Sequence: Synthetic polypeptide"
MAADGYLPDWLEDNLSEGIREWWALKPGAPQPKANQQHQDNARGLVLPGYKYLGPGNGLDKGEPVNAADAAALEHDKAYDQQLKAGDNPYLKYNHADAEFQERLKEDTSFGGNLGRAVFQAKKRLLEPLGLVEEAAKTAPGKKRPVEQSPQEPDSSAGIGKSGAQPAKKRLNFGQTGDTESVPDPQPIGEPPAAPSGVGSLTMASGGGAPVADNNEGADGVGSSSGNWHCNSQWLGDRVITTSTRTWALPTYNNHLYKQISNSTSGGSSNDNAYFGYSTPWGYFDFNRFHCHFSPRDWQRLINNNWGFRPKRLNFKLFNIQVKEVTDNNGVKTIANNLTSTVQVFTDSDYQLPYVLGSAHEGCLPPFPADVFMIPQYGYLTLNDGSQAVGRSSFYCLEYFPSQMLRTGNNFQFSYEFENVPFHSSYAHSQSLDRLMNPLIDQYLYYLSKTINGSGQNQQTLKFSVAGPGNMAVQGRNYIPGPSYRQQRVSTTVTQNNNSEFAWPGASSWALNGRNSLMNPGPAMASHKEGEDRFFPLSGSLIFGKQGTGRDNVDADKVMITNEEEIKTTNPVATESYGQVATNHQSAQAQAQTGWVQNQGILPGMVWQDRDVYLQGPIWAKIPHTDGNFHPSPLMGGFGMKHPPPQILIKNTPVPADPPTAFNKDKLNSFITQYSTGQVSVEIEWELQKENSKRWNPEIQYTSNYYKSNNVEFAVNTEGVYSEPRPIGTRYLTRNL

SEQ ID NO: 723 - protein, 736 aa, Artificial Sequence
  source: /note="Description of Artificial Sequence: Synthetic polypeptide"
MAADGYLPDWLEDNLSEGIREWWALKPGAPQPKANQQHQDNARGLVLPGYRYLGPGNGLDKGEPVNAADAAALEHDKAYDQQLKAGDNPYLKYNHADAEFQERLKEDTSFGGNLGRAVFQAKKRLLEPLGLVEEAAKTAPGKKRPVEQSPQEPDSSAGIGKSGAQPAKKRLNFGQTGDTESVPDPQPIGEPPAAPSGVGSLTMASGGGAPVADNNEGADGVGSSSGNWHCDSQWLGDRVITTSTRTWALPTYNNHLYKQISNSTSGGSSNDNAYFGYSTPWGYFDFNRFHCHFSPRDWQRLINNNWGFRPKRLNFKLFNIQVKEVTDNNGVKTVANNLTSTVQVFTDSDYQLPYVLGSAHEGCLPPFPADVFMIPQYGYLTLNDGSQAVGRSSFYCLEYFPSQMLRTGNNFQFSYEFENVPFHSSYAHSQSLDRLMNPLIDQYLYYLSKTINGSGQNQQTLKFSVAGPSNMAVQGRNYIPGPSYRQQRVSTTVTQNNNSEFAWPGASSWALNGRNSLMNPGPAMASHKEGEDRFFPLSGSLIFGKQGTGRDNVDADKVMITNEEEIKTTNPVATESYGQVATNHQSAQAQAQTGWVQNQGILPGMVWQDRDVYLQGPIWAKIPHTDGNFHPSPLMGGFGMKHPPPQILIKNTPVPADPPTAFNKDKLNSFITQYSTGQVSVEIEWELQKENSKRWNPEIQYTSNYYKSNNVEFAVNTEGVYSGPRPIGTRYLTRNL

SEQ ID NO: 724 - protein, 736 aa, Artificial Sequence; identical to SEQ ID NO: 134
  source: /note="Description of Artificial Sequence: Synthetic polypeptide"

SEQ ID NO: 725 - protein, 736 aa, Artificial Sequence
  source: /note="Description of Artificial Sequence: Synthetic polypeptide"
MAADGYLPDWLEDNLSEGIREWWALKPGAPQPKANQQRQDNARGLVLPGYKYLGPGNGLDKGEPVNAADAAALEHDKAYDQQLKAGGNPCLKYNHADAEFQERLKEDTSFGGNLGRAVFQAKKRLLEPLGLVEEAAKTAPGKKRPVEQSPQEPDSSAGIGRSGAQPAKKRLNFGQTGDTESVPDPQPIGEPPAAPSGVGSLTMASGGGAPVADNNEGADGVGSSSGNWHCDSQWLGDRVITTSTRTWALPTYNNHLYKQISNSTSGGSSNDNAYFGYSTPWGYFDFNRFHCHFSPRDWQRLINNNWGFRPKRLNFKLFNIQVKEVTDNNGVKAIANNLTSTVQVFTDSDYQLPYVLGSAHEGCLPPFPADVFMIPQYGYLTLNDGSQAVGRSSFYCLEYFPSQMLRTGNNFQFSYEFENVPFHSSYAHSQSLDRLMNPLIDQYLYYLSKTIDGSGQNQQTLKFSVAGPSNMAVQGRNYIPGPSYRQQRVSTTVTQNNNSEFAWPGASSWALNGRNSLMDPGPAMASHKEGEDRFFPLSGSLIFGKQGTGRDNVDADKVMITNEEEIKTTNPVATESYGQVATNHQSAQAQAQTGWVQNQGILPGMVWQDRDVYLQGPIWAKIPHTGGNFHPSPLMGGFGMKHPPPQILIKNTPVPADPPTAFNKDKLNSFITQYSTGQVSVEIEWELQKENSKRWNPEIQYTSNYYKSNNVEFAVNTEGVYSEPRPIGTRYLTRNL

SEQ ID NO: 726 - protein, 736 aa, Artificial Sequence
  source: /note="Description of Artificial Sequence: Synthetic polypeptide"
MAADGYLPDWLEDNLSEGIREWWALKPGAPQPKANQQHQDNARGLVLPGYKYLGPGNGLDKGEPVNAADAAALEHDKAYDQQLKAGDNPYLKYNHADAEFQERLKEDTSFGGNLGRAVFQAKKRLLEPLGLVEEAAKTAPGKKRPVEQSPQEPDSSAGIGKSGAQPAKKRLNFGQTGDTESVPDPQPIGEPPAAPSGVGSLTMASGGGAPVADNNEGADGVGSSSGNWHCDSQWLGDRVITTSTRTWALPTYNNHLYKQISNSTSGGSSNDNAYFGYSTPWGYFDFNRFHCHFSPRDWQRLINNNWGFRPKRLNFKLFNIQVKEVTDNNGVKTIANNLTSTVQVFTDSDYQLPYVLGSAHEGCLPPFPADVFMIPQYGYLTLNDGSQAVGRSSFYCLEYFPSQMLRTGNNFQFSYEFENVPFHSSYAHSQSLDRLMNPLIDQYLYYLSKTINGSGQNQQTLKFSVAGPSNMAVQGRNYIPGPSYRQQRVSTTVTQNNNSEFAWPGASSWALNGRNSLMNPGPAMASHKEGEDRFFPLSGSLIFGKQGTGRDNVDADKVMITNEEEIKTTNPVATESYGQVATNHQSAQAQAQTGWVQNQGILPGMVWQDRDVYLQGPIWAKIPHTDGNFHPSPLMGGFGMKHPPPQILIKNTPVPADPPTAFNKDKLNSFITQYSTGQVSVEIEWELQKENSKRWNPEIQYTSNYYKPNNVEFAVNTEGVYSEPRPIGTRYLTRNL

SEQ ID NO: 727 - protein, 736 aa, Artificial Sequence
  source: /note="Description of Artificial Sequence: Synthetic polypeptide"
MAADGYLPDWLEDNLSEGIREWWALKPGAPQPKANQQHQDNARGLVLPGYKYLGPGNGLDKGEPVNAADAAALEHNKAYDQQLKAGDNPYLKCNHADAEFQERLKEDTSFGGNLGRAVFQAKKRPLEPLGLVEEAAKTAPGKKRPVEQSPQEPDSSAGIGKSGAQPAKKRLNFGQTGDTESVPDPQPIGEPPAAPSGVRSLTMASGGGAPVADNNEGADGVGSSSGNWHCDSQWLGDRVITTSTRTWALPTYNNHLYKQISNSTSGGSSNDNAYLGYSTPWGYFDFNRFHCHFSPRDWQRLINNNWGFRPKRLNFKLFNIQVKEVTDNNGVKTIANNLTSTVQVFTDSDYQLPYVLGSAHEGCLPPFPADVFMIPQYGYLTLNDGSQAVGRSSFYCLEYFPSQMLRTGNNFQFSYEFENVPFHSSYAHSQSLDRLMNPLIDQYLYYLSKTINGSGQNQQTLKFSVAGPSNMAVQGRNYIPGPSYRQQRVSTTVTQNNNSEFAWPGASSWALNGRNSLMNPGPTMASHKEGEDRFFPLSGSLIFGKQGTGRDNVDADKVMITNEEEIKTTNPVATESYGQVATNHQSAQAQAQTGWVQNQGILPGMVWQDRDVYLQGPIWAKIPHTDGNFHPSPLMGGFGMKHPPPQILIKNTPVPADPPTAFNKDKLNSFITQYSTGQVSVEIEWELQKENSKRWNPEIQYTSNYYKSNNVEFAVNTEGVYSEPRPIGTRYLTRNL

SEQ ID NO: 728 - protein, 736 aa, Artificial Sequence
  source: /note="Description of Artificial Sequence: Synthetic polypeptide"
MAADGYLPDWLEDNLSEGIREWWALKPGAPQPKANQQHQDNARGLVLPGYKYLGPGNGLDKGEPVNAADAAALVHDKAYDQQLKAGDNPYLKCNHADAEFQERLKEDTSFGGNLGRAVFQAKKRLLEPLGLVEEAAKTAPGKKRPVEQSPQEPDSSAGIGKSGAQPAKKRLNFGQTGDTESVPDPQPIGEPPAAPSGVGSLTMASGGGAPVADNNEGADGVGSSSGNWHCDSQWLGDRVITTSTRTWALPTYNNHLYKQISNSTSGGSSNDNAYLGYSTPWGYFDFNRFHCHFSPRDWQRLINNNWGFRPKRLNFKLFNIQVKEVTDNNGVKTIANNLTSTVQVFTDSDYQLPYVLGSAHEGCLPPFPADVFTIPQYGYLTLNDGSQAVGRSSFYCLEYFPSQMLRTGNNFQFSYEFENVPFHSSYAHSQSLDRLMNPLIDQYLYYLSKTINGSGQNQQTLKFSVAGPSNMAVQGRNYIPGPSYRQQRVSTTVTQNNNSEFAWPGASSWALNGRNSLMNPGPAMASHKEGEDRFFPLSGSLIFGKQGTGRDNVDADKVMITNEEEIKTTNPVATESYGQVATNHQSAQAQAQTGWVQNQGILPGMVWQDRDVYLQGPIWAKIPHTDGNFHPSPLMGGFGMKHPPPQILIKNTPVPADPPTAFNKDKLNSFITQYSTGQVSVEIEWELQKENSKRWNPEIQYTSNYYKSNNVEFAVNTEGVYSEPRPIGPRYLTRNF

SEQ ID NO: 729 - protein, 736 aa, Artificial Sequence
  source: /note="Description of Artificial Sequence: Synthetic polypeptide"
MAADGYLPDWLEDNLSEGIREWWALKPGAPQPKANQQHQDNARGLVLPGYKYLGPGNGLDKGEPVNAADAAALEHNKAYDQQLKAGDNPYLKCNHADAEFQERLKEDTSFGGNLGRAVFQAKKRLLEPLGLVEEAAKTAPGKKRPVEQSPQEPDSSAGIGKSGAQPAKKRLNFGQTGDTESVPDPQPIGEPPAAPSGVRSLTMASGGGAPVADNNEGADGVGSSSGNWHCDSQWLGDRVITTSTRTWALPTYNNHLYKQISNSTSGGSSNDNAYLGYSTPWGYFDFNRFHCHFSPRDWQRLINNNWGFRPKRLNFKLFNIQVKEVTDNNGVKTIANNLTSTVQVFTDSDYQLPYVLGSAHEGCLPPFPADVFMIPQYGYLTLNDGSQAVGRSSFYCLEYFPSQMLRTGNNFQFSYEFENVPFHSSYAHSQSLDRLMNPLIDQYLYYLSKTINGSGQNQQTLKFSVAGPSNMAVQGRNYIPGPSYRQQRVSTTVTQNNNSEFAWPGASSWALNGRNSLMNPGPAMASHKEGEDRFFPLSGSLIFGKQGTGRDNVDADKVMITNEEEIKTTNPVATESYGQVATNHQSAQAQAQTGWVQNQGILPGMVWQDRDVYLQGPIWAKIPHTDGNFHPSPLMGGFGMKHPPPQILIKNTPVPADPPTAFNKDKLNSFITQYSTGQVSVEIEWELQKENSKRWNPEIQYTSNYYKSNNVEFAVNTEGVYSEPRPIGTRYLTRNL

SEQ ID NO: 730 - protein, 736 aa, Artificial Sequence
  source: /note="Description of Artificial Sequence: Synthetic polypeptide"
MAADGYLPDWLEDNLSEGIREWWALKPGAPQPKANQQHQDNARGLVLPGYKYLGPGNGLDKGEPVNAADAAALEHDKAYDQQLKAGDNPYLKCNHADAEFQERLKEDTSFGGNLGRAVFQAKKRLLEPLGLVEEAAKTAPGKKRPVEQSPQEPDSSAGIGKSGAQPAKKRLNFGQTGDTESVPDPQPIGEPPAAPSGVGSLTMASGGGAPVADNNEGADGVGSSSGNWHCDSQWLGDRVITTSTRTWALPTYNNHLYKQISNSTSGGSSNDNAYLGYSTPWGYFDFNRFHCHFSPRDWQRLINNNWGFRPKRLNFELFNIQVKEVTDNNGVKTIANNLTSTVQVFTDSDYQLPYVLGSAHEGCLPPFPADVFMIPQYGYLTLNDGSQAVGRSSFYCLEYFPSQMLRTGNNFQSSYEFENVPFHSSYAHSQSLDRLMNPLIDQYLYYLSKTINGSGQNQQTLKFSVAGPSNMAVQGRNYIPGPSYRQQRASTTVTQNNNSEFAWPGASSWALNGRNSLMNPGPAMASHKEGEDRFFPLSGSLIFGKQGTGRDNVDADKVMITNEEEIKTTNPVATESYGQVATNHQSAQAQAQTGWVQNQGILPGMVWQDRDVYLQGPIWAKIPHTDGNFHPSPLMGGFGMKHPPPQILIKNTPVPADPPTAFNKDKLNSFITQYSTGQVSVEIEWELQKENSKRWNPEIQYTSNYYKSNNVEFAVNTEGVYSEPRPIGTRYLTRNL

SEQ ID NO: 731 - protein, 736 aa, Artificial Sequence
  source: /note="Description of Artificial Sequence: Synthetic polypeptide"
MAADGYLPDWLEDNLSEGIREWWALKPGAPQPKANQQHQDNARGLVLPGYKYLGPGNGLDKGEPVNAADAAALEHDKAYDQQLKAGDNPYLKCNHADAEFQERLKEDTSFGGNLGRAVFQAKKRLLEPLGLVEEAAKTAPGKKRPVEQSPQEPDSSAGIGKSGAQPAKKRLNFGQTGDTESVPDPQPIGEPPAAPPGVGSLTMASGGGAPVADNNEGADGVGSSSGNWHCDSQWLGDRVITTSTRTWALPTYNNHLYKQISNSTSGGSSNDNAYLGYSTPWGYFDFNRFHCHFSPRDWQRLINNNWGFRPKRLNFKLFNIQVKEVTDNNGVKTIANNLTSTVQVFTDSDYQLPYVLGSAHEGCLPPFPADVFMIPQYGYLTLNDGSQAVGRSSFYCLEYFPSQMLRTGNNFQFSYEFENVPFHSSYAHSQSLDRLMNPLIDQYLYYLSKTISGSGQNQQTLKFSVAGPSNMAVQGRNYIPGPSYRQQRVSTTVTQNNSSEFAWPGASSWALNGRNSLMNPGPAMASHKEGEDRFFPLSGSLIFGKQGTGRDNVDADKVMITNEEEIKTTNPVATESYGQVATNHQSAQAQAQTGWVQNQGILSGMVWQDRDVYLQGPIWAKIPHTDGNFHPSPLMGGFGMKHPPPQILIKNTPVPADPPTAFNKDKLNSFITQYSTGQVSVEIEWELQKENSKRWNPEIQYTSNYYKSNNVEFAVNTEGVYSEPRPIGTRYLTRNL

SEQ ID NO: 732 - protein, 736 aa, Artificial Sequence
  source: /note="Description of Artificial Sequence: Synthetic polypeptide"
MAADGYLPDWLEDNLSEGIREWWALKPGAPQPKANQQHQDNARGLVLPGYKYLGPGNGLDKGEPVNAADAAALEHDKAYDQQLKAGDNPYLKCNHADAEFQERLKEDTSFGGNLGRAVFQAKKRLLEPLGLVEEAAKTAPGKKRPVEQSPQEPDSSAGIGKSGAQPAKKRLNFGQTGDTESVPDPQPIGEPPAAPSGVGSLTMASGGGAPVADNNEGADGVGSSSGNWHCDSQWLGDRVITTSTRTWALPTYNNHLYKQISNSTSGGSSNDNAYLGYSTPWGYFDFNRFHCHFSPRDWQRLINNNWGFRPKRLNFKLFNIQVKEVTDNNGVKTIANNLTSTVQVFTDSDYQLPYVLGSAHEGCLPPFPADVFMIPQYGYLTLNDGSQAVGRSSFYCLEYFPSQMLRTGNNFQFSYEFENVPFHSSYAHSQSLDRLMNPLIDQYLYYLSKTINGSGQNQQTLKFSVAGPSNMAVQGRNYIPGPSYRQQRVSTTVTQNNNSEFAWPGASSWALNGRNSLMNPGPAMASHKEGEDRFFPLSGSLIFGKQGTGRDNVDADKVMITNEEEIKTTNPVATESYGQVATNHQSAQAQAQTGWVQNQGILPGMVWQDRDVYLQGPIWAKIPHTDGNFHPSPLMGGFGMKHPPPQILIKNTPVPADPPTAFNKDKLNSFITQYSTGQVSVEIEWELQKENSKRWNPEIQYTSNYYKSNNVEFAVNTEGVYSEPRPIGTRYLTRNL

SEQ ID NO: 733 - protein, 736 aa, Artificial Sequence; identical to SEQ ID NO: 732
  source: /note="Description of Artificial Sequence: Synthetic polypeptide"

SEQ ID NO: 734 - protein, 736 aa, Artificial Sequence
  source: /note="Description of Artificial Sequence: Synthetic polypeptide"
MAADGYLPDWLEDNLSEGIREWWALKPGAPQPKANQQHQDNARGLVLPGYKYLGPGNGLDKGEPVNAADAAALEHDKAYDQQLKAGDNPYLKCNHADAEFQERLKEDTSFGGNLGRAVFQAKKRLLEPLGLVEEAAKTAPGKKRPVEQSPQEPDSSAGIGKSGAQPAKKRLNFGQTGDTESVPDPQPIGEPPAAPSGVGSLTMASGGGAPVADNNEGADGVGSSSGNWHCDSQWLGDRVITTSTRTWALPTYNNHLYKQISNSTSGGSSNDNAYLDYSTPWGYFDFNRFHCHFSPRDWQRLINNNWGFRPKRLNFKLFNIQVKEVTDNNGVKTIANNLTSTVQVFTDSDYQLPYVLGSAHEGCLPPFPADVFMIPQYGYLTLNDGSQAVGRSSFYCLEYFPSQMLRTGNNFQFSYEFENVPFHSSYAHSQSLDRLMNPLIDQYLYYLSKTINGSGQNQQTLKFSVAGPSNMAVQGRNYIPGPSYRQQRVSTTVTQNNNSEFAWPGASSWALNGRNSLMNPGPAMASHKEGEDRFFPLSGSLIFGKQGTGRDNVDADKVMITNEEEIKTTNPVATESYGQVATNHQSAQAQAQTGWVQNQGILPGMVWQGRDVYLQGPIWAKIPHTDGNFHPSPLMGGFGMKHPPPQILIKNTPVPADPPTAFNKDKLNSFITQYSTGQVSVEIEWELQKENSKRWNPEIQYTSNYYKSNNVEFAVNTEGVYSEPRPIGTRYLTRNL

SEQ ID NO: 735 - protein, 736 aa, Artificial Sequence; identical to SEQ ID NO: 732
  source: /note="Description of Artificial Sequence: Synthetic polypeptide"

SEQ ID NO: 736 - protein, 736 aa, Artificial Sequence
  source: /note="Description of Artificial Sequence: Synthetic polypeptide"
MAADGYPPDWLEDNLSEGIREWWALKPGAPQPKANQQHQDNARGLVLPGYKYLGPGNGLDKGEPVNAADAAALEHDKAYDQQLKAGDNPHLKYNHADAEFQERLKEDTSFGGNLGRAVFQAKKRLLEPLGLVEEAAKTAPGKKRPVEQSPQEPDSSAGIGKSGAQPAKKRLNFGQTGDTESVPDPQPIGEPPAAPSGVGSLTMASGGGAPVADNNEGADGVGSSSGNWHCDSQWLGDRVITTSTRTWALPTYNNHLYKQISNSTSGGSSNDNAYFGYSTPWGYFDFNRFHCHFSPRDWQRLINNNWGFRPKRLNFKLFNIQVKEVTDNNGVKTIANNLTSTVQVFTDSDYQLPYVLGSAHEGCLPPFPADVFMIPQYGYLTLNDGSQAVGRSSFYCLEYFPSQMLRTGNNFQFSYEFENVPFHSSYAHSQSLDRLMNPLIDQYLYYLSKTINGSGQNQQTLKFSVAGPSNMAVQGRNYIPGPSYRQQRVSTTVTQNNNSEFAWPGASSWALNGRNSLMNPGPAMASHKEGEDRFFPLSGSLIFGKQGTGRDNVDADKVMITNEEEIKTTNPVATESYGQVATNHQSAQAQAQTGWVQNQGILPGMVWQDRDVYLQGPIWAKIPHTDGNFHPSPLMGGFGVKHPPPQILIKNTPVPADPPTAFNKDRLNSFITQYSTGQVSVEIEWELQKENSKRWNPEIQYTSNYYKSNNVEFAVNTEGVYSEPRPIGTRYLTRNL

SEQ ID NO: 737 - protein, 736 aa, Artificial Sequence
  source: /note="Description of Artificial Sequence: Synthetic polypeptide"
MAADGYLPDWLEDNLSEGIREWWALKPGAPQPKANQQHQDNARGLVLPGYKYLGPGNGLDKGEPVNAADAAALEHDKAYDQQLKAGDNPYLKYNHADAEFQERLKEDTSFGGNLGRAVFQAKKRLLEPLGLVEEAAKTAPGKKRPVEQSPQEPDSSAGIGKSGAQPAKKRLNFGQTGDTESVPDPQPIGEPPAAPSGVGSLTMASGGGAPVADNNEGADGVGSSSGNWHCDSQWLGDRVITTSTRTWALPTYNNHLYKQISNSTSGGSSNDNAYFGYSTPWGYFDFNRFHCHFSPRDWQRLINNNWGFRPKRLNFKLFNIQVKEVTDNNGVKTIANNLTSTVQVFTDSDYQLPYVLGSAHEGCLPPFPADVFMIPQYGYLTLNDGSQAVGRSSFYCLEYFPSQMLRTGNNFQFSYEFENVPFHSSYAHSQSLDRLMNPLIDQYLYYLSKTINGSGQNQQTLKFSVAGPSNMAVQGRNYIPGPSYRQQRVSTTVTQNNNSEFAWPGASSWALNGRNSLMNPGPAMASHKEGEDRFFPLSGSLIFGKQGTGRDNVDADKVMITNEEEIKTTNPVATESYGQVATNHQSAQAQAQTGWVQNQGILPGMVWQDRDVYLQGPIWAKIPHTDGNFHPSPLMGGFGVKHPPPQILIKNTPVPADPPTAFNKDKLNSFITQYSTGQVSVEIEWELQKENSKRWNPEIQYTSNYYKSNNVEFAVNTEGVYSEPRPIGTRYLTRNL

SEQ ID NO: 738 - protein, 736 aa, Artificial Sequence
  source: /note="Description of Artificial Sequence: Synthetic polypeptide"
MAADGYLPDWLEDNLSEGIREWWALKPGAPQPKANQQHQDNARGLVLPGYKYLGPGNGLDKGEPVNAADAAALEHDKAYDQQLKAGDNPYLKYNHADAEFQERLKEDTSFGGNLGRAVFQAKKRLLEPLGLVEEAAKTAPGKKRPVEQSPQEPDSSAGIGKSGAQPAKKRLNFGQTGDTESVPDPQPIGEPPAAPSGVGSLTMASGGGAPVADNNEGADGVGSSSGNWHCDSQWLGDRVITTSTRTWALPTYNNHLYKQISNSTSGGSSNDNAYFGYSTPWGYFDFNRFHCHFSPRDWQRLTNNNWGFRPKRLNFKLFNIQVKEVTDNNGVKTIANNLTSTVQVFTDSDYQLPYVLGSAHEGCLPPFPADVFMIPQYGYLTLNDGSQAVGRSSFYCLEYIPSQMLRTGNNFQFSYEFENVPFHSSYAHSQSLDRLMNPLIDQYLYYLSKTINGSGQNQQTLKFSVAGPSNMAVQGRNYIPGPSYRQQRVSTTVTQNNNSEFAWPGASSWALNGRNSLMNPGPAMASHKEGEDRFFPLSGSLIFGKQGTGRDNVDADKVMITNEEEIKTTNPVATESYGQVATNHQSAQAQAQTGWVQNQGILPGMVWQDRDVYLQGPIWAKIPHTDGNFHPSPLMGGFGVKHPPPQILIKNTPVPADPPTAFNKDKLNSFITQYSTGQVSVEIEWELQKENSKRWNPEIQYTSNYYKSNNVEFAVNTEGVYSEPRPIGTRYLTRNL

SEQ ID NO: 739 - protein, 736 aa, Artificial Sequence
  source: /note="Description of Artificial Sequence: Synthetic polypeptide"
MAADGYLPDWLEDNLSEGIREWWALKPGAPQPKANQQHQDNARGLVLPGYKYLGPGNGLDKGEPVNAADAAALEHDKAYDQQLKAGDNPYLKYNHADAEFQERLKEDTSFGGNLGRAVFQAKKRLLEPLGLVEEAAKTAPGKKRPVEQSPQEPDSSAGIGKSGAQPAKKRLNFGQTGDTESVPDPQPIGEPPAAPSGVGSLTMASGGGAPVADNNEGADGVGSSSGNWHCDSQWLGDRVITTSTRTWALPTYNNHLYKQISNSTSGGSSNDNAYFGYSTPWGYFDFNRFHCHFSPRDWQRLINNNWGFRPKRLNFKLFNIQVKEVTDNNGVKTIANNLTSTVQVFTDSDYQLPYVLGSAHEGCLPPFPADVFMIPQYGYLTLNDGSQAVGRSSFYCLEYFPSQMLRTGNNFQFSYEFENVPFHSSYAHSQSLDRLMNPLIDQYLYYLSKTINGSGQNQQTLKFSVAGPSNMAVQGRNYIPGPSYRQQRVSTTVTQNNNSEFAWPGASSWALNGRNSLMNPGPAMASHKEGEDRFFPLSGSLISGKQGTGRDNVDANKVMITNEEEIKTTNPVATESYGQVATNHQSAQAQAQTGWVQNQGILPGMVWQDRDVYLQGPIWAKIPHTDGNFHPSPLMGGFEMKHPPPQILIKNTPVPADPPTAFNKDKLNSFITQYSTGQVSVEIEWELQKENSKRWNPEIQYTSNYYKSNNVEFAVNTEGVYSEPRPIGTRYLTRNL

SEQ ID NO: 740 - protein, 736 aa, Artificial Sequence
  source: /note="Description of Artificial Sequence: Synthetic polypeptide"
MAADGYLPDWLEDNLSEGIREWWALKPGAPQPKANQQHQDNARGLVLPGYKYLGPGNGLDKGEPVNAADAAALEHDKAYDQQLKAGDNPYLKYNHADAEFQERLKEDTSFGGNLGRAVFQAKKRLLEPLGLVEEAAKTAPGKKRPVEQSPQEPDSSAGIGKSGAQPAKKRLNFGQTGDTESVPDPQPIGEPPAAPSGVGSLTIASGGGAPVADNNEGADGVGSSSGNWHCDSQWLGDRVITTSTRTWALPTYNNHLYKRISNSTSGGSSNDNAYFGYSTPWGYFDFNRFHCHFSPRDWQRLINNNWGFRPKRLNFKLFNIRVKEVTDNNGVKTITNNLTSTVQVFTDSDYQLPYVLGSAHEGCLPPFPADVFMIPQYGYLTLNDGSQAVGRSSFYCLEYFPSQMLRTGNNFQFSYEFENVPFHSSYAHSQSLDRLMNPLIDQYLYYLSKTINGSGQNQQTLKFSVAGPSNMAVQGRNYIPGPSYRQQRVSTTVTRNNNSEFAWPGASSWALNGRNSLMNPGPAMASHKEGEDRFFPLSGSLIFGKQGTGRDNVDADKVMITNEEEIKTTNPVATESYGQVATNHQSAQAQAQTGWVQNQGILPGMVWQDRDVYLQGPIWAKIPHTDGNFHPSPLMGGFGVKHPPPQILIKNTPVPADPPTAFNKDKLNSFITQYSTGQVSVEIEWELQKENSKRWNPEIQYTSNYYKSNNVEFAVNTEGVYSEPRPIGTRYLTRNL

SEQ ID NO: 741 - protein, 736 aa, Artificial Sequence
  source: /note="Description of Artificial Sequence: Synthetic polypeptide"
MAADGYLPDWLEDNLSEGIREWWALKPGAPQPKANQQHQDNARGLVLPGYKYLGPGNGLDKGEPVNAADAAALEHDKAYDQQLKAGDNPYLKYNHADAEFQERLKEDTSFGGNLGRAVFQAKKRLLEPLGLVEEAAKTAPGKKRPVEQSPQEPDSSAGIGKSGAQPAKKRLNFGQTGDTEPVPDPQPIGEPPAAPSGVGSLTMASGGGAPVADNNEGADGVGSSSGNWHCDSQWLGDRVITTSTRTWALPTYNNHLYKQISNSTSGGSSNDNAYFGYSTPWGYFDFNRFHCHFSPRDWQRLINNNWGFRPKRLNFKLFNIQVKEVTDNNGVKTIANNLTSTVQVFTDSDYQLPYVLGSAHEGCLPPFPAGVFMIPQYGYLTLNDGSQAVGRSSFYCLEYFPSQMLRTGNNFQFSYEFENVPFHSSYAHSQSLDRLMNPLIDQYLYYLSKTINGSGQNQQTLKFSVAGPSNMAVQGRNYIPGPSYRQQRVSTTATQNNNSEFAWPGASSWALNGRNSLMNPGPAMASHKEGEDRFFPLSGSLIFGKQGTGRDNVDADKVMITNEEEIKTTNPVATESYGQVATNHQSAQAQAQTGWVQNQGILPGMVWQDRDVYLQGPIWAKIPHTDGNFHPSPLMGGFGMKHPPPQILIKNTPVPADPPTAFNKDKLNSFITQYSTGQVSVEIEWELQKENSKRWNPEIQYTSNYYKSNNVEFAVNTEGVYSEPRPIGTRYLTRNL

SEQ ID NO: 742 - protein, 736 aa, Artificial Sequence
  source: /note="Description of Artificial Sequence: Synthetic polypeptide"
MAADGYLPDWLEDNLSEGIREWWALKPGAPQPKANQQHQDNARGLVLPGYKYLGPGNGLDKGEPVNAADAAALEHDKAYDQQLKAGDNPYLKYNHADAGFQERLKEDTSFGGNLGRAVFQAKKRLLEPLGLVEEAAKTAPGKKRPVEQSPQEPDSSAGIGKSGAQPAKKRLNFGQTGDTESVPVPQPIGEPPAAPSGVGSLTMASGGGAPVADNNEGADGVGSSSGNWHCDSQWLGDRVITTSTRTWALPTYNNHLYKQISNSTSGGSSNDNAYFGYSTPWGYFDFNRFHCHFSPRDWQRLINNNWGFRPKRLNFKLFNIQVKEVTDNNGVKTIANNLTSTVQVFTDSDYQLPYVLGSAHEGCLPPFPADVFMIPQYGYLTLNDGSQAVGRSSFYCLEYFPSQMLRTGNNFQFSYEFENVPFHSSYAHSQSLDRLMNPLIDQYLYYLSKTINGSGQNQQTLKFSVAGPSNMAVQGRNYIPGPSYRQQRVSTTVTQNNNSEFAWPGASSWALNGRNSLMNPGPAMASHKEGEDRFFPLSGSLIFGKQGAGRDNVDADKVMITNEEEIKTTNPVATESYGQVATNHQSAQAQAQTGWVQNQGILPGMVWQDRDVYLQGPIWAKIPHTDGNFHPSPLMGGFGMKHPPPQILIKNTPVPADPPTAFNKDKLNSFITQYSTGQVSVEIEWELQKENSKRWNPEIQYTSNYYKSNNVEFAVNTEGVYSEPRPIGTRYLTRNL

SEQ ID NO: 743 - protein, 736 aa, Artificial Sequence
  source: /note="Description of Artificial Sequence: Synthetic polypeptide"
  MOD_RES (126)..(126): Any naturally occurring amino acid
MAADGYLPDWLEDNLSEGIRERWALKPGAPQPKANQQHQDNARGLVLPGYKYLGPGNGLDKGEPVNAADAAALEHDKAYDQQLKAGDNPYLKYNHADAEFQERLKEDTSFGGNLGRAVFQAKKRLXEPLGLVEEAAKTAPGKKRPVEQSPQEPDSSAGIGKSGAQPAKKRLNFGQTGDTESVPDPQPIGEPPAAPSGVGSLTMASGGGAPVADNNEGADGVGSSSGNWHCDSQWLGDRVITTSTRTWALPTYNNHLYKQISNSTSGGSSNDNAYFGYSTPWGYFDFNRFHCHFSPRDWQRLINNNWGFRPKRLNFKLFNIQVKEVTDNNGVKTIANNLTSTVQVFTDSDYQLPYVLGSAHEGCLPPFPADVFMIPQYGYLTLNDGSQAVGRSSFYCLEYFPSQMLRTGNNFQFSYEFENVPFHSSYAHSQSPDRLMNPLIDQYLYYLSKTINGSGQNQQTLKFSVAGPSNMAVQGRNYIPGPSYRQQRVSTTVTQNNNSEFAWPGASSWALNGRNSLMNPGPAMASHKEGEDRFFPLSGSLIFGKQGTGRDNVDADKVMITNEEEIKTTNPVATESYGQVATNHQSAQAQAQTGWVQNQGILPGMVWQDRDVYLQGPIWAKIPHTDGNFHPSPLMGGFGVKHPPPQILIKNTPVPADPPTAFNKDKLNSFITQYSTGQVSVEIEWELQKENSKRWNPEIQYTSNYYKSNNVEFAVNTEGVYSEPRPIGTRYLTRNL

SEQ ID NO: 744 - protein, 736 aa, Artificial Sequence
  source: /note="Description of Artificial Sequence: Synthetic polypeptide"
MAADGYLPDWLEDNLSEGIREWWALKPGAPQPKANQQHQDNARGLVLPGYKYLGPGNGLDKGEPVNAADAAALEHDKAYDQQLKAGDNPYLKYNHADAEFQERLKEDTSFGGNLGRAVFQAKKRLLEPLGLVEEAAKTAPGKKRPVEQSPQEPDSSAGIGKSGAQPAKKRLNFGQTGDTESVPDPQPIGEPPAAPSGVGSLTMASGGGAPVADNNEGADGVGSSSGNWHCDSQWLGDRVITTSTRTWALPTYNNHLYKQISNSTSGGSSNDNAYLGYSTPWGYFDFNRFHCHFSPRDWQRLINNNWGFRPKRLNFKLFNIQVKEVTDNNGVKTIANNLTSTVQVFTDSDYQLPYVLGSAHEGCLPPFPADVFMIPQYGYLTLNDGSQAVGRSSFYCLEYFPSQMLRTGNNFQFSYEFENVPFHSSYAHSQSLDRLMNPLIDQYLYYLSKTINGSGQNQQTLKFSVAGPSNMAVQGRNYIPGPSYRQQRVSTTVTQNNNSEFAWPGASSWALNGRNSLMNPGPAMASHKEGEDRFFPLSGSLIFGKQGTGRDNVDADKVMITNEEEIKTTNPVATESYGQVATNHQSAQAQAQTGWVQNQGILPGMVWQDRDVYLQGPIWAKIPHTDGNFHPSPLMGGFGMKHPPPQILIKNTPVPADPPTAFNKDKLNSFITQYSTGQVSVEIEWELQKENSKRWNPEIQYTSNYYKSNNVEFAVNTEGVYSEPRPIGTRYLTRNL

SEQ ID NO: 745 - protein, 736 aa, Artificial Sequence
  source: /note="Description of Artificial Sequence: Synthetic polypeptide"
MAADGYLPDWLEDNLSEGIREWWALKPGAPQPKANQQHQDNARGLVLPGYKYLGPGNGLDKGEPVNAADAAALEHDKAYDQQLKAGDNPYLKYNHADAEFQERLKEDTSFGGNLGRAVFQAKKRLLEPLGLVEEAAKTAPGKKRPVEQSPQEPDSSAGIGKSGAQPAKKRLNFGQTGDTESVPDPQPIGEPPAAPSGVGSLTMASGGGAPVADNNEGADGVGSSSGNWHCDSQWLGDRVITTSTRTWALPTYNNHLYKQISNSTSGGSSNDNAYFGYSTPWGYFDFNRFHCHFSPRDWQRLINNNWGFRPKRLNFKLFNIQVKEVTDNNGVKTIANNLTSTVQVFTDSDYQLPYVLGSAHEGCLPPFPADVFMIPQYGYLTLNDGSQAVGRSSFYCLEYFPSQMLRTGNNFQFSYEFENVPFHSSYAHSQSLDRLMNPLIDQYLYYLSKTINGSGQNQQTLKFSVAGPSNMAVQGRNYIPGPSYRQQRVSTTVTQNNNSEFAWPGASSWALNGRNSLMNPGPAMASHKEGEDRFFPLSGSLIFGKQGTGRDNVDADKVMITNEEEIKTTNPVATESYGQVATNHQSAQAQAQTGWVQNQGILPGMVWQDRDVYLQGPIWAKIPHTDGNFHPSPLMGGFGMKHPPPQILIKNTPVPADPPTAFNKDKLDSFITQYSTGQVSVEIEWELQKENSKRWNPVIQYTSNYYKSNNVEFAVNTEGVYSEPRPIGTRYLTRNL

SEQ ID NO: 746 - protein, 736 aa, Artificial Sequence
  source: /note="Description of Artificial Sequence: Synthetic polypeptide"
MAADGYLPDWLEDNLSEGIREWWDLKPGAPKPKANQQKQDDGRGLVLPGYKYLGPFNGLDKGEPVNAADAAALEHDKAYDQQLKAGDNPYLRYNHADAEFQERLQEDTSFGGNLGRAVFQAKKRVLEPLGLVEEGAKTAPGKKRPVEQSPQEPDSSSGIGKTGQQPAKKRLNFGQTGDSESVPDPQPLGEPPATPAAVGPTTMASGGGAPMADNNEGVDGVGNASGNWHCDSTWLGDRVITTSTRTWALPTYNNHLYKQISSASTGASNDNHYFGYSTPWGYFDFNRFHCHFSPRDWQRLINNNWGFRPKRLNFKLFNIQVKEVTTNDGVTTIANNLTSTVQVFSDSEYQLPYVLGSAHQGCLPPFPADVFMIPQYGYLTLNNGSQAVGRSSFYCLEYFPSQMLRTGNNFTFSYTFEEVPFHSSYAHSQSLDRLMNPLIDQYLYYLNRTQNQSGSAQNKDLLFSRGSPAGMSVQPKNWLPGPCYRQQRVSKTKTDNNNSNFTWTGASKYNLNGRESIINPGTAMASHKDDEDKFFPMSGVMIFGKESAGASNTALDNVMITDEEEIKATNPVATERFGTVAVNFQSSSTDPATGDVHAMGALPGMVWQDRDVYLQGPIWAKIPHTDGHFHPSPLMGGFGLKNPPPQILIKNTPVPANPPAEFSATKLASFITQYSTGQVSVEIEWELQKENSKRWNPEVQYTSNYAKSANVDFTVDNNGLYTEPRPIGTRYLTRPL

SEQ ID NO: 747 - protein, 736 aa, Artificial Sequence
  source: /note="Description of Artificial Sequence: Synthetic polypeptide"
MAADGYLPDWLEDNLSEGIREWWDLKPGAPKPKANQQKQDDGRGLVLPGYKYLGPFNGLDKGEPVNAADAAALEHDKAYDQQLKAGDNPYLRYNHADAEFQERLQEDTSFGGNLGRAVFQAKKRVLEPLGLVEEGAKTAPGKRRPVEQSPQEPDSSSGIGKTGQQPAKKRLNFGQTGDSESVPDPQPLGEPPATPAAVGPTTMASGGGAPMADNNEGADGVGNASGNWHCDSTWLGDRVITTSTRTWALPTYNNHLYKQISSASTGASNDNHYFGYSTPWGYFDFNRFHCHFSPRDWQRLINNNWGFRPKRLNFKLFNIQVKEVTTNDGVTTIANNLTSTVQVFSDSEYQLPYVLGSAHQGCLPPFPADVFMIPQYGYLTLNNGSQAVGRSSFYCLEYFPSQMLRTGNNFTFSYTFEEVPFHSSYAHSQSLDRLMNPLIDQYLYYLNRTQNQSGSAQNKDLLFSRGSPAGMSVQPKNWLPGPCYRQQRVSKTKTDNNNSNFTWTGASKYNLNGRESIINPGTAMASHKDDEDKFFPMSGVMIFGKESAGASNTALDNVMITDEEEIKATNPVATERFGTVAVNFQSSSTDPATGDVHAMGALPGMVWQDRDVYLQGPIWAKIPHTDGHFHPSPLMGGFGLKNPPPQILIKNTPVPANPPAEFSATKFASFITQYSTGQVSVEIEWELQKENSKRWNPEVQYTSNYAKSANVDFTVDNNGLYTEPRPIGTRYLTRPL

SEQ ID NO: 748 - protein, 736 aa, Artificial Sequence
  source: /note="Description of Artificial Sequence: Synthetic polypeptide"
MAADGYLPDWLEDNLSEGIREWWDLKPGAPKPKANQQKQDDGRGLVLPGYKYLGPFNGLDKGEPVNAADAAALEHDKAYDQQLKAGDNPYPRYNHADAEFQERLQEDTSFGGNLGRAVFQAKKRVLEPLGLVGEGAKTAPGKKRPVEQSPQEPDSSSGIGKTGQQPAKKRLNFGQTGDSESVPDPQPLGEPPATPAAVGPTTMASGGGAPMADNNEGADGVGNASGNWHCDSTWLGDRVITTSTRTWALPTYNNHLYKQISSASTGASNDNHYFGYSTPWGYFDFNRFHCHFSPRDWQRLINNNWGFRPKRLNFKLFNIQVKEVTTNDGVTTIANNLTSTVQVFSDSEYQLPYVLGSAHQGCLPPFPADVFMIPQYGYLTLNNGSQAVGRSSFYCLEYFPSQMLRTGNNFTFSYTFEEVPFHSSYAHSQSLDRLMNPPIDQYLYYLNRTQNQSGSAQNKDLLFSRGSPAGMSVQPKNWLPGPCYRQQRVSKTKTDNNNSNFTWTGASKYNLNGRESIINPGTAMASHKDDEDKFFPMSGVMIFGKESAGASNTALDNVMITDEEEIKATNPVATERFGTVAVNFQSSSTDPATGDVHAMGALPGMVWQDRDVYLQGPIWAKIPHTDGHFHPSPLMGGFGLKNPPPQILIKNTPVPANPPAEFSATKFASFITQYSTGQVSVEIEWELQKENSKRWNPEVQYTSNYAKSANVDFTVDNNGLYTEPRPIGTRYLTRPL

SEQ ID NO: 749 - protein, 736 aa, Artificial Sequence
  source: /note="Description of Artificial Sequence: Synthetic polypeptide"
MAADGYLPDWLEDNLSEGIREWWDLKPGAPKPKANQQKQDDGRGLVLPGYKYLGPFNGLDKGEPVNAADAAALEHDKAYDQQLKAGDNPYLRYNHADAEFQERLQEDTSFGGNLGRAVFQAKKRVLEPLGLVEEGAKTAPGKKRPVEQSPQEPDSSSGIGKTGQQPAKKRLNFGQTGDSESVPDPRPLGEPPATPAAVGPTTMASGGGAPMADNNEGADGVGNASGNWHCDSTWLGDRVITTSTRTWALPTYNNHLYKQISSASTGASNDNHYFGYSTPWGYFDFNRFHCHFSPRDWQRLINNNWGFRPKRLNFKLFNIQVKEVTTNDGVTTIANNLTSTVQVFSDSEYQLPYVLGSAHQGCLPPFPADVFMIPQYGYLTLNNGSQAVGRSSFYCLEYFPSQMLRTGNNFTFSYTFEEVPFHSSYAHSQSLDRLMNPLIDQYLYYLNRTQNQSGSAQNKDLLFSRGPPAGMSVQPKNWLPGPCYRQQRVSKTKTDNNNSNFTWTGASKYNLNGRESIINPGTAMASHKDDEDKFFPMSGVMIFGKESAGASNTALDNVMITDEEEIKATNPVATERFGTVAVNFQSSSTDPATGDVHAMGALPGMVWQDRDVYLQGPIWAKIPHTDGHFHPSPLMGGFGLKNPPPQILIKNTPVPANPPAEFSATKFASFITQYSTGQVSVEIEWELQKENSKRWNPEVQYTSNYAKSANVDFTVDNNGLYTEPRPIGTRYLTRPL

SEQ ID NO: 750 - protein, 736 aa, Artificial Sequence
  source: /note="Description of Artificial Sequence: Synthetic polypeptide"
MAADGYLPDWLEDNLSEGIREWWDLKPGAPKPKANQQKQDDGRGLVLPGYKYLGPFNGLDKGEPVNAADAAALEHDKAYDQQLKAGDNPYLRYNHADAEFQERLQEDTSFGGNLGRAVFQAKKRVLEPLGLVEEGAKTAPGKKRPVEQSPQEPDSSSGIGKTGQQPAKKRLNFGQTGGSESVPDPQPLGEPPATPAAVGPTTMASGGGAPMADNNEGADGVGNASGNWHCDSTWLGDRVITTSTRTWALPTYNNHLYKQISSASTGASNDNHYFGYSTPWGYFDFNRFHCHFSPRDWQRLINNNWGFRPKRLNFKLFNIQVKEVTTNDGVTTIANNLTSTVQVFSDSEYQLPYVLGSAHQGCLPPFPADVFMIPQYGYLTLNNGSQAVGRSSFYCLEYFPSQMLRTGNNFTFSYTFEEVPFHSSYAHSQSLDRLMNPPIDQYLYYLNRTQNQSGSAQNKDLLFSRGSPAGMSVQPKNWLPGPCYRQQRVSKTKTDNNNSNFTWTGASKYNLNGRESIINPGTAMASHKDDEDKFFPMSGVMIFGKESAGASNTALDNVMITDEEEIKATNPVATERFGTVAVNFQSSSTDPATGDVHAMGALPGMVWQDRDVYLQGPIWAKIPHTDGHFHPSPLMGGFGLKNPPPQILIKNTPVPANPPAEFSATKFASFITQYSTGQVSVEIEWELQKENSKRWNPEVQYTSNYAKSANVDFTVDNNGLYTEPRPIGTRYLTRPL

SEQ ID NO: 751 - protein, 736 aa, Artificial Sequence
  source: /note="Description of Artificial Sequence: Synthetic polypeptide"
MAADGYLPDWLEDNLSEGIREWWDLKPGAPKPKANQQKQDDGRGLVLPGYKYLGPFNGLDKGEPVNAADAAALEHDKAYDQQLKAGDNPYLRYNHADAEFQERLQEDTSFGGNLGRAVFQAKKRVLEPLGLVEEGAKTAPGKKRPVEQSPQEPDSSSGIGKTGQQPAKKRLNFGQTGDSESVPDPQPLGEPPATPAAVGPTTMASGGGAPMADNNEGADGVGNASGNWHCDSTWLGDRVITTSTRTWALPTYNNHLYKQISSASTGASNDNHYFGYSTPWGYFDFNRFHCHFSPRDWQRLINNNWGFRPKRLNFKLFNIQVKEVTTNDGVTTIANNLTSTVQVFSDSEYQLPYVLGSAHQGCLPPFPADVFMIPQYGYLTLNNGSQAVGRSSFYCLEYFPSQMLRTGNNFTFSYTFEEVPFHSSYAHSQSLDRLMNPLIDQYLYYLNRTQNQSGSAQNKDLLFSRGSPAGMSVQPKNWLPGPCYRQQRVSKTKTDNNNSNFTWTGASKYNLNGRESIINPGTAVASHKDDEDKFFPMSGVMIFGKESAGASNTALDNVMITDEEEIKATNPVATERFGTVAVNFQSSSTDPATGDVHAMGALPGMVWQDRDVYLQGPIWAKIPHTDGHFHPSPLMGGFGLKNPPPQILIKNTPVPANPPAEFSATKFASFITQYSTGQVSVEIEWELQKENSKRWNPEVQYTSNYAKSANVDFTVDNNGLYTEPRPIGTRYLTRPL

SEQ ID NO: 752 - protein, 736 aa, Artificial Sequence
  source: /note="Description of Artificial Sequence: Synthetic polypeptide"
MAADGYLPDWLEDNLSEGIREWWDLKPGAPKPKANQQKQDDGRGLVLPGYKYLGPFNGLDKGEPVNAADAAALEHDKAYDQQLKAGDNPYLRYNHADAEFQERLQEDTSFGGNLGRAVFQAKKRVLEPLGLVEEGAKTAPGKKRPVEQSPQEPDSSSGIGKTGQQPAKKRLNFGQTGDSESVPDPQPLGEPPATPAAVGPTTMASGGGAPMADNNEGADGVGNASGNWHCDSTWLGDRVITTSTRTWALPTYNNHLYKQISSASTGASNDNHYFGYSTPWGYFDFNRFHCHFSPRDWQQLINNNWGFRPKRLNFKLFNIQVKEVTTNDGVTTIANNLTSTVQVFSDSEYQLPYVLGSAHQGCLPPFPADVFMIPQYGYLTLNNGSQAVGRSSFYCLEYFPSQMLRTGNNFTFSYTFEEVPFHSSYAHSQSLDRLMNPLIDQYLYYLNRTQNQSGSAQNKDLLFSRGSPAGMSVQPKNWLPGPCYRQQRVSKTKTDNNNSNFTWTGASKYNLNGRESIINPGTAMASHKDDEDKFFPMSGVMIFGKESAGASNTALDNVMITDEEEIKATNPVATERFGTVAVNFQSTSTDPATGDVHAMGALPGMVWQDRDVYLQGPIWAKIPHTDGHFHPSPLMGGFGLKNPPPQILIKNTPVPANPPAEFSATKFASFITQYSTGQVSVEIEWELQKENSKRWNPEVQYTSNYAKSADVDFTVDNNGLYTEPRPIGTRYLTRPL

SEQ ID NO: 753 - protein, 736 aa, Artificial Sequence
  source: /note="Description of Artificial Sequence: Synthetic polypeptide"
MAADGYLPDWLEDNLSEGIREWWDLKPGAPKPKANQQKQDDGRGLVLPGYKYLGPFNGLDKGEPVNAADAAALEHDKAYDQQLKAGDNPYLRYNHADAEFQERLQEDTSFGGNLGRAVFQAKKRVLEPLGLVEEGAKTAPGKKRPVEQSPQEPDSSSGIGKTGQQPAKKRLNFGQTGDSESVPDPQPLGEPPATPAAVGPTTMASGGGAPMADNNEGADGVGNASGNWHCDSTWLGDRVITTSTRTWALPTYNNHLYKQISSASTGASNDNHYFGYSTPWGYFDFNRFHCHFSPRDWQRLINNNWGFRPKRLNFKLFNIQVKEVTTNDGVTTIANNLTSTVQVFSDSEYQPPYVLGSAHQGCLPPFPADVFMIPQYGHLTLNNGSQAVGRSSFYCLEYFPSQMLRTGNNFTFSYTFEEVPFHSSYAHSQSLDRLTNPLIDQYLYYLNRTQNQSGSAQNKDLLFSRGSPAGMSVQPKNWLPGPCYRQQRVSKTKTDNNNSNFTWTGASKYNLNGRESIINPGTAMASHKDDEDKFFPMSGVMIFGKESAGASNTALDNVMITDEEEIKATNPVATERFGTVAVNFQSSSTDPATGDVHAMGALPGMVWQDRDVYLQGPIWAKIPHTDGHFHPSPLMGGFGLKNPPPQILIKNTPVPANPPAEFSATKFASFITQYSTGQVSVEIEWELQKENSKRWNPEVQYTSNYAKSANVDFTVDNNGLYTEPRPIGTRYLTRPL

SEQ ID NO: 754 - protein, 736 aa, Artificial Sequence
  source: /note="Description of Artificial Sequence: Synthetic polypeptide"
MAADGYLPDWLEDNLSEGIREWWDLKPGAPKPKANQQEQDDGRGLVLPGYKYLGPFNGLDKGEPVNAADAAALEHDKAYDQQLKAGDNPYLRYNHADAEFQERLQEDTSFGGNLGRAVFQAKKRVLEPLGLVEEGAKTAPGKKRPVEQSPQEPDSSSGIGKTGQQPAKKRLNFGQTGDSESVPDPQPLGEPPATPAAVGPTTMASGGGAPMADNNEGADGVGNASGNWHCDSTWLGDRVITTSTRTWALPTYNNHLYKQISSASTGASNDNHYFGYSTPWGYFDFNRFHCHFSPRDWQRLINNNWGFRPKRLNFKLFNIQVKEVTTNDGVTTIANNLTSTVQVFSDSEYQLPYVLGSAHQGCLPPFPADVFMIPQYGYLTLNNGSQAVGRSSFYCLEYFPSQMLRTGNNFTFSYTFEEVPFHSSYAHSQSLDRLMNPLIDQYLYYLNRTQNQSGSAQNKDLLFSRGSPAGMSVQPKNWLPGPCYRQQRVSKTKTDNNNSNFTWTGASKYNLNGRESIINPGTAMASHKDDEDKFFPMSGVMIFGKESAGASNTALDNVMITDEEEIKATNPVATERFGTVAVNFQSSSTDPATGDVHATGTLPGMVWQDRDVYLQGPIWAKIPHTDGHFHPSPLMGGFGLKNPPPQILIKTTPVPANPPAEFSATKFASFITQYSTGQVSVEIEWELQKENSKRWNPEVQYTSNYAKSANVDFTVDDNGLYTEPRPIGTRYLTRPL

SEQ ID NO: 755 - protein, 736 aa, Artificial Sequence
  source: /note="Description of Artificial Sequence: Synthetic polypeptide"
MAADGYLPDWLEDNLSEGIREWWDLKPGAPKPKANQQKQDDGRGLVLPGYKYLGPFNGLDKGEPVNAADAAALEHDKAYDQQLKAGDNPYLRYNHADAEFQERLQEDTSFGGNLGRAVFQAKKRVLEPLGLVEEGAKTAPGKKRPVEQSLQEPDSSSGIGKTGQQPAKKRLNFGQTGDSESVPDPQPLGEPPATPAAVGPTTMASGGGAPMADNNEGADGVGNASGNWHCDSTWLGDRVITTSTRTWALPTYNNHLYKQISSASTGASNDNHYFGYSTPWGYFDFNRFHCHFSPRDWQRLINNNWGFRPKRLNFKLFNIQVKEVTTNDGVTTIANNLTSTVQVFSDSEYQLPYVLGSAHQGCLPPFPADVFMIPQYGYLTLNNGSQAVGRSSFYCLEYFPSQMLRTGNNFTFSYTFEEVPFHSSYAHSQSLDRLMNPLIDQYLYYLNRTQNQSGSAQNKDLLFSRGSPAGMSVQPKNWLPGPCYRQQRVSKTKTDNDNSNFTWTGASKYNLNGRESIINPGTAMASHKDDEDKFFPMSGVMIFGKESAGASNTALDNVMITDEEEIKATNPVATERFGTVAVNFQSSSTDPATGDVHAMGALPGMVWQDRDVYLQGPIWAKIPHTDGHFHPSPLMGGFGLKNPPPQILIKNTPVPANPPAEFSATKFASFITQYSTGQVSVEIEWELQKENSKRWNPEVQYTSNYAKSANVDFTVDNNGLYTEPRPIGTRYLTRPL

SEQ ID NO: 756 - protein, 736 aa, Artificial Sequence
  source: /note="Description of Artificial Sequence: Synthetic polypeptide"
MAADGYLPDWLEDNLSEGIREWWDLKPGAPKPKANQQKQDDGRGLVLPGYKYLGPFNGLDKGEPVNAADAAALEHDKAYDQQLKAGDNPYLRYNHADAEFQERLQEDTSFGGNLGRAVFQAKKRVLEPLGLVEEGAKTAPGKKRPVEQSPQEPDSSSGIGKTGQQPAKKRLNFGQTGDSESVPDPQPLGEPPATPAAVGPTTMASGGGAPMADNNEGADGVGNASGNWHCDSTWLGDRVITTSTRTWALPTYNNHLYKQISSASTGASNDNHYFGYSTPWGYFDFNRFHCHFSPRDWQRLINNNWGFRPKRLNFKLFNIQVKEVTTNDGVTTIANNLTSTVQVFSDSEYQLPYVLGSAHQGCLPPFPADVFMIPQYGYLTLNNGSQAVGRSSFYCLEYFPSQMLRTGNNFTFSYTFEEAPFHSSYAHSQSLDRLMNPLIDQYLYYLNRTQNQSGSAQNKDLLFSRGSPAGMSVQPKNWLPGPCYRQQRVSKTKTDNNNSNFTWTGASKYNLNGRESIINPGTAMASHKDDEDKFFPMSGVMIFGKESAGASNTALDNVMITDEEEIKATNPVATERFGTVAVNFQSSSTDPATGDVHAMGALPGMVWQDRDVYLQGPIWAKIPHTDGHFHPSPLMGGFGLKNPPPQILIKNTPVPANPPAEFSATKFASFITQYSTGQVSVEIEWELQKENSKRWNPEVQYTSNYAKSANVDFTVDNNGLYTEPRPVGTRYLTRPL

SEQ ID NO: 757 - protein, 736 aa, Artificial Sequence
  source: /note="Description of Artificial Sequence: Synthetic polypeptide"
MAADGYLPDWLEDNLSEGIREWWDLKPGAPKPKANQQKQDDGRGLVLPGYKYLGPFNGLDKGEPVNAADAAALEHDKAYDQQLKAGDNPYLRYNHADAEFQERLQENTSFGGNLGRAVFQAKKRVLEPLGLVEEGAKTAPGKKRPVEQSPQEPDSSSGIGKTGQQPAKKRLNFGQTGDSESVPDPQPLGEPPATPAAVGPTTMASGGGAPMADNNEGADGVGNASGNWHCDSTWLGDRVITTSTRTWALPTYNNHLYKQISSASTGASNDNHYFGYSTPWGYFDFNRFHCHFPPRDWQRLINNNWGFRPKRLNFKLFNIQVKEVTSNDGVTTIANNLTSTVQVFSDSEYQLPYVLGSAHQGCLPPFPADVFMIPQYGYLTLNNGSQAVGRSSFYCLEYFPSQMLRTGNNFTFSYTFEEVPFHSSYAHSQSLDRLMNPLIDQYLYYLNRTQNQSGSAQNKDLLFSRGSPAGMSVQPKNWLPGPCYRQQRVSKTKTDNNNSNFTWTGASKYNLNGRESIINPGTAMASHKDDEDKFFPMSGVMIFGKESAGASNTALDNVMITDEEEIKATNPVATERFGTVAVNFQSSSTDPATGDVHAMGALPGMVWQDRDVYLQGPIWAKIPHTDGHFHPSPLMGGFGLKNPPPQILIKNTPVPANPPAEFSATKFASFITQYSTGQVSVEIEWELQKENSKRWNPEVQYTSNYAKSANVDFTVDNNGLYTEPRPIGTRYLTRPL

SEQ ID NO: 758 - protein, 736 aa, Artificial Sequence
  source: /note="Description of Artificial Sequence: Synthetic polypeptide"
MAADGYLPDWLEDNLSEGIREWWDLKPGAPKPKANQQKQDDGRGLVLPGYKYLGPFNGLDKGEPVNAADAAALEHDKAYDQQLKAGDNPYLRYNHADAEFQERLQEDTSFGGNLGRAVFQAKKRVLEPLGLVEEGAKTAPGKKRPVEQSPQEPDSSSGIGKTGQQPAKKRLNFGQTGDSESVPDPQPLGEPPATPAAVGPTTMASGGGAPMADNNEGADGVGNASGNWHCDSTWLGDRVITTSTRTWALPTYNNHLYKQISSASTGASNDNHYFGYSTPWGYFDFNRFHCHFSPRDWQRLINNNWGFRPKRLNFKLFNIQVKEVTTNDGVTTIANNLTSTVQVFSDSEYQLPYVLGSAHQGCLPPFPADVFMIPQYGYLTLNNGSQAVGRSSFYCLEYFPSQMLRTGNNFTFSYTFEEVPFHSSYAHSQSLDRLMNPLIDQYLYYLNRTQNQSGSAQNKDLLFSRGSPAGTSVQPKNWLPGPCYRQQRVSKTKTDNNNSNFTWTGASKYNLNGRESIINPGTAMASHKDDEDKFFPMSGVMIFGKESAGASNTALDNVMITDEEEIKATNPVATERFGTVAVNFQSSSTDPATGDVHAMGALPGMVWQDRDVYLQGPIWAKIPHTDGHFHPSPLMGGFGLKNPPPQILIKNTPVPANPPAEFSATKFASFITQYSTGQVSVEIEWELQKENSKRWNPEVQYTSNYAKSANVDFTVDNNGLYTGPRPIGTRYLTRPL

SEQ ID NO: 759 - protein, 736 aa, Artificial Sequence
  source: /note="Description of Artificial Sequence: Synthetic polypeptide"
MAADGYLPDWLEDNLSEGIREWWDLKPGAPKPKANQQKQDDGRGLVLPGYKYLGPFNGLDKGEPVNAADAAALEHDKAYDQQLKAGDNPYLRYNHADAEFQERLQEDTSFGGNLGRAVFQAKKRVLEPLGLVEEGAKTAPGKKRPVEQSPQEPDSSSGIGKTGQQPAKKRLNFGQTGDSESVPDPQPLGEPPATPAAVGPTTMASGGGAPMADNNEGADGVGNAPGNWHCDSTWLGDRVITTSTRTWALPTYNNHLYKQISSASTGASNDNHYFGYSTPWGYFDFNRFHCHFSPRDWQRLINNNWGFRPKRLNFKLFNIQVKEVTTNDGVTTIANNLTSTVQVFSDSEYQLPYVLGSAHQGCLPPFPADVFMIPQYGYLTLNNGSQAVGRSSFYCLEYFPSQMLRTGNNFTFSYTFEEVPFHSSYAHSQSLDRLMNPLIDQYLYYLNRTQNQSGSAQNKDLLFSRGSPAGMSVQPKNWLPGPCYRQQRVSKTKTDNNNSNFTWTGASKYNLNGRESIINPGTAMASHKDDEDKFFPMSGVMIFGKESAGASNTALDNVMITGEEEIKATNPVATERFGTVAVNFQSSSTDPATGDVHAMGALPGMVWQDRDVYLQGPIWAKIPHTDGHFHPSPLMGGFGLKNPPPQILIKNTPVPANPPAEFSATKFASFITQYSTGQVSVEIEWELQKENSKRWNPEVQYTSNYAKSANVDFTVDNNGLYTEPRPIGTRYLTRPL

SEQ ID NO: 760 - protein, 736 aa, Artificial Sequence
  source: /note="Description of Artificial Sequence: Synthetic polypeptide"
MAADGYLPDWLEDNLSEGIREWWDLKPGAPKPKANQQKQDDGRGLVLPGYKYLGPFNRLDKGEPVNAADAAALEHDKAYDQQLKAGDNPYLRYNHADAEFQERLQEDTSFGGNLGRAVFQAKKRVLEPLGLVEEGAKTAPGRKRPVEQSPQEPDSSSGIGKTGQQPAKKRLNFGQTGDSESVPDPQPLGEPPATPAAVGPTTMASGGGAPMADNNEGADGVGNASGNWHCDSTWLGDRVITTSTRTWALPTYNNHLYKQISSASTGASNDNHYFGYSTPWGYFDFNRFHCHFSPRDWQRLINNNWGFRPKRLNFKLFNIQVKEVTTNDGVTTIANNLTSTVQVFSDSEYQLPYVLGSAHQGCLPPFPADVFMIPQYGYLTLNNGGQAVGRSSFYCLEYFPSQMLRTGNNFTFSYTFEEVPFHSSYAHSQSLDRLMNPLIDQYLYYLNRTQNQSGSAQNKDLLFSRGSPAGMSVQPKNWLPGPCYRQQRVSKTKTDNNNSNFTWTGASKYSLNGRESIINPGTAMASHKDDEDKFFPMGGVMIFGKESAGASNTALDNAMITDEEEIKATNPVATERFGTVAVNFQSSSTDPATGDVHAMGALPGMVWQDRDVYLQGPIWAKIPHTDGHFHPSPLMGGFGLKNPPPQILIKNTPVPANPPAEFSATKFASFITQYSTGQVSVEIEWELQKENSKRWNPEVQYTSNYAKSANVDFTVDNNGLYTEPRPIGTRYLTRPL

SEQ ID NO: 761 - protein, 736 aa, Artificial Sequence
  source: /note="Description of Artificial Sequence: Synthetic polypeptide"
MAADGYLPDWLEDNLSEGIREWWDLKPGAPKPKANQQKQDDGRGLVLPGYKYLGPFNGLDKGEPVNAADAAALEHDKAYDQQLKAGDNPYLRYNHADAEFQERLQEDTSFGGNLGRAVFQAKKRVLEPLGLVEEGAKTAPGKKRPVEQSPQEPDSSSGIGKTGQQPAKKRLNFGQTGDSESVPDPQPLGEPPATPAAVGPTTMASGGGAPMADNNEGADGVGNASGNWHCDSTWLGGRVITTSTRTWALPTYNNHLYKQISSASTGASNDNHYFGYSTPWGYFDFNRFHCHFSPRDWQRLINNNWGFRPKRLNFKLFNIQVKEVTTNDGVTTIANNLTSTVQVFSDSEYQLPYVLGSAHQGCLPPFPADVFMIPQYGYLTLNNGSQAVGRSSFYCLEYFPSQMLRTGNNSTFSYTFEEVPFHSSYAHSQSLDRLMNPLIDQYLYYLNRTQNQSGSAQNKDLLFSRGSPAGMSVQPKNWLPGPCYRQQRVSKTKTDNNNSNFTWTGASKYNLNGRESIINPGTAMASHKDDEDKFFPMSGVMIFGKESAGASNTALDNVMITDEEEIKATNPVATERFGTVAVNFQSSSTDPATGDVHAMGTLPGMVWQDRDVYLQGPIWAKIPHTDGHFHPSPLMGGFGLKNPPPQILIKNTPVPANPPAEFSATKFASFITQYSTGQVSVEIEWELQKENSKRWNPEVQYTSNYAKSANVDFTVDNNGLYTEPRPIGTRYLTRPL

SEQ ID NO: 762 - protein, 736 aa, Artificial Sequence
  source: /note="Description of Artificial Sequence: Synthetic polypeptide"
MAADGYLPDWLEDNLSEGIREWWDLKPGAPKPKANQQKQDDGRGLVLPGYKYLGPFNGLDKGEPVSAADAAALEHDKAYDQQLKAGDNPYLRYNHADAEFQERLQEDTSFGGNLGRAVFQAKKRVLEPLGLVEEGAKTAPGKKRPVEQSPQEPDSSSGIGKTGQQPAKERLNFGQTGDSESVPDPQPLGEPPATPAAVGPTTMASGGGAPMADNNEGADGVGNASGNWHCDSTWLGDRVITTSTRTWALPTYNNHLYKQISSASTGASNDNHYFGYSTPWGYFDFNRFHCHFSPRDWQRLINNNWGFRPKRLNFKLFNIQVKEVTTNDGVTTIANNLTSTVQVFSDSEYQLPYVLGSAHQGCLPPFPADVFMIPQYGYLTLNNGSQAVGRSSFYCLEYFPSQMLRTGNNFTFSYTFEEVPFHSSYAHSQSLDRLMNPLIDQYLYYLNRTQNQSGSAQNKDLLFSRGSPAGMSVQPKNWLPGPCYRQQRVSKTKTDNNNSNFTWTGASKYNLNGRESIINPGTAMASHKDDEDKFFPMSGVMIFGKESAGASNTALDNVMITDEEEIKATNPVATERFGTVAVNFQSSSTDPATGDVHAMGALPGMVWQDRDVYLQGPIWAKIPHTDGHFHPSPLMGGFGLKNPPPQILIKNTPVPANPPAEFSATKFASFITQYSTGQVSVEIEWELQKENSKRWNPEVQYTSNYAKSANVDFTVDNNGLYTEPRPIGTRYLTRPL

SEQ ID NO: 763 - protein, 736 aa, Artificial Sequence
  source: /note="Description of Artificial Sequence: Synthetic polypeptide"
MAADGYLPDWLEDNLSEGIREWWDLKPGAPKPKANQQKQDDGRGLVLPGYKYLGPFNGLDKGEPVNAADAAALEHDKAYDQQLKAGDNPYLRYNHADAEFQERLQEDTSFGGNLGRAVFQAKKRVLEPLGLVEEGAKTAPGKKRPVEQSPQEPDSSSGIGKTGQQPAKKRLNFGQTGDSESVPDPQPLGEPPATPAAVGPTTMASGGGAPMADNNEGADGVGNASGNWHCDSTWLGDRVITTSTRTWALPTYNNHLYKQISSASTGASNDNHYFGYSTPWGYFDFNRFHCHFSPRDWQRLINNNWGFRPKRLNFKLFNIQVKEVTTNDGVTTIANNLTSTVQVFSDSEYQLPYVLGSAHQGCLPPFPADVFMIPQYGYLTLNNGSQAVGRSSFYCLEYFPSQMLRTGNNFTFSYTFEEVPFHSSYAHSQSLDRLMNPLIDQYLYYLNRTQNQSGSAQNKDLLFSRGSPAGMSVQPKNWLPGPCYRQQRVSKTKTDNNNSNFTWTGASKYNLNGRESIINPGTAMASHKDDEDKFFPMSGVMIFGKESAGASNTALDNVMITDEGEIKATNPVATERFGTVAVNFQSSSTDPATGDVHAMGALPGMVWQDRDVYLQGPIWAKIPHTDGHFHPSPLMGGFGLKNPPPQILIKNTPVPANPPAEFSATKFASFITQYSTGQVSVEIEWELQKENSKRWNPEVQYTSNYAKSANVDFTVDNNGLYTEPRPIGTRYLTRPL

SEQ ID NO: 764 - protein, 736 aa, Artificial Sequence
  source: /note="Description of Artificial Sequence: Synthetic polypeptide"
MAADGYLPDWLEDNLSEGIREWWDLKPGAPKPKANQQKQDDGRGLVLPGYKYLGPFNGLDKGEPVNAADAAALEHDKAYDQQLKAGDNPYLRYNHADAEFQERLQEDTSFGGNLGRAVFQAKKRVLEPFGLVEEGAKTAPGKKRPVEQSPQEPDSSSGIGKTGQQPAKKRLNFGQTGDSESVPDPQPLGEPPATPAAVGPTTMASGGGAPMADNNEGADGVGNASGNWHCDSTWLGDRVITTSTRTWALPTYNNHLYKQISSASTGASNDNHYFGYSTPWGYFDFNRFHCHFSPRDWQRLINNNWGFRPKRLNFKLFNIQVKEVTTNDGVTTIANNLTSTVQVFSDSEYQLPYVLGSAHQGCLPPFPADVFMIPQYGYLTLNNGSQAVGRSSFYCPEYFPSQMLRTGNNFTFSYTFEEVPFHSSYAHSQSLDRLMNPLIDQYLYYLNRTQNQSGSAQNKDLLFSRGSPAGMSVQPKNWLPGPCYRQQRVSKTKTDNNNSNFTWTGASKYNLNGRESIINPGTAMASHKDDKDKFFPMSGVMIFGKESAGASNTALDNVMITDEEEIKATNPVATERFGTVAVNFQSSNTDPATGDVHVMGALPGMVWQDRDVYLQGPIWAKIPHTDGHFHPSPLMGGFGLKHPPPQILIKNTPVPANPPAEFSATKFASFITQYSTGQVSVEIEWELQKENSKRWNPEVQYTSNYAKSANVDFTVDNNGLYTEPRPIGTRYLTRPL

SEQ ID NO: 765 - protein, 736 aa, Artificial Sequence
  source: /note="Description of Artificial Sequence: Synthetic polypeptide"
MAADGYLPDWLEDNLSEGIREWWDLKPGAPKPKANQQKQDDGRGLVLPGYKYLGPFNGLDKGEPVNAADAAALEHDKAYDQQLKAGDNPYLRYNHADAEFQERLQEDTSFGGNLGRAVFQAKKRVLEPFGLVEEGAKTAPGKKRPVEQSPQEPDSSSGIGKTGQQPAKKRLNFGQTGDSESVPDPQPLGEPPATPAAVGPTTMASGGGAPMADNNEGADGVGNASGNWHCDSTWLGDRVITTSTRTWALPTYNNHLYKQISSASTGASNDNHYFGYSTPWGYFDFNRFHCHFSPRDWQRLINNNWGFRPKRLNFKLFNIQVKEVTTNDGVTTIANNLTSTVQVFSDSEYQLPYVLGSAHQGCLPPFPADVFMIPQYGYLTLNNGSQAVGRSSFYCLEYFPSQMLRTGNNFTFSYTFEEVPFHSSYAHSQSLDRLMNPLIDQYLYYLNRTQNQSGSAQNKDLLFSRGSPAGMSVQPKNWLPGPCYRQQRVSKTKTDNNNSNFTWTGASKYNLNGRESIINPGTAMASHKDDKDKFFPMSGVMIFGKESAGASNTALDNVMITDEEEIKATNPVATERFGTVAVNFQSSDTDPATGDVHVMGALPGMVWQDRDVYLQGPIWAKIPHTDGHFHPSPLMGGFGLKHPPPQILIKNTPVPANPPAEFSATKFASFITQYSTGQVSVEIEWELQKENSKRWNPEVQYTSNYAKSANVDFTVDNNGLYTEPRPIGTRYLTRPL

SEQ ID NO: 766 - protein, 736 aa, Artificial Sequence
  source: /note="Description of Artificial Sequence: Synthetic polypeptide"
MAADGYLPDWLEDNLSEGIREWWDLKPGAPKPKANQQKQGDGRGLVLPGYKYLGPFNGLDKGEPVNAADAAALEHDKAYDQQLKAGDNPYLRYNHADAEFQERLQEDTSFGGNLGRAVFQAKKRVLEPFGLVEEGAKTAPGKKRPVEQSPQEPDSSSGIGKTGQQPAKKRLNFGQTGDSESVPDPQPLGEPPATPAAVGPTTMASGGGAPMADNNEGADGVGNASGNWHCDSTWLGDRVITTNTRTWALPTYNNHLYKQISSASTGASNDNHYFGYSTPWGYFDFNRFHCHFSPRDWQRLINNNWGFRPKRLNFKLFNIQVKEVTTNDGVTTIANNLTSTVQVFSDSEYQLPYVLGSAHQGCLPPFPADVFMIPQYGYLTLNNGSQAVGRSSFYCLEYFPSQMLRTGNNFTFSYTFEEVPFHSSYGHSQSLDRLMNLLIDQYLYYLNRTQNQSGSAQNKDLLFSRGSPAGMFVQPKNWLPGPCYRQQRVSKTKTDNNNSNFTWTGASKYNLNGRESIINPGTAMASHKDDEDKFFPMSGVMIFGKESAGASNTALDNVMITDEEEIKATNPVATERFGTVAVNFQSSSTDPATGDVHVMGALPGMVWQDRDVYLQGPIWAKIPHTDGHFHPSPLMGGFGLKHPPPQILIKNTPVPANPPAEFSATKFASFITQYSTGQVSVEIEWELQKENSKRWNPEVQYTSNYAKSANVDFTVDNNGLYTEPRPIGTRYLTRPL

SEQ ID NO: 767 - protein, 736 aa, Artificial Sequence
  source: /note="Description of Artificial Sequence: Synthetic polypeptide"
MAADGYLPDWLEDNLSEGIREWWDLKPGAPKPKANQQKQDDGRGLVLPGYKYLGPFNGLDKGEPVNAADAAALEHDKAYDQQLKAGDNPYLRYNHADAEFQERLQEDTSFGGNLGRAVFQAKKRVLEPFGLVEEGAKTAPGKKRPVEQSPQEPDSSSGIGKTGQQPAKKRLNFGQTGDSESVPDPQPLGEPPATPAAVGPTTMASGGGAPMADNNEGADGVGNASGNWHCDSTWLGDRVITTNTRTWALPTYNNHLYKQISSASTGASNDNHYFGYSTPWGYFDFNRFHCHFSPRDWQRLINNNWGFRPKRLNFKLFNIQVKEVTTNDGVTTIANNLTSTVQVFSDSEYQLPYVLGSAHQGCLPPFPADVFMIPQYGYLMLNNGSQAVGRSSFYCLEYFPSQMLRTGNNFTFSYTFEEVPFHSSYAHSQSLDRLMNPLIDQYLYYLNRTQNQSGSAQNKDLLFSRGSPAGMSVQPKNWLPGPCYRQQRVSKTKTDNNNSNFTWTGASKYNLNGRESIINPGTAMASHKDDEDKFFPMSGVMIFGKESAGASNTALDNVMITDEEEIKATNPAATERFGTVAVNFQSSSTDPATGDVHVMGALPGMVWQDRDVYLQGPIWAKIPHTDGHFHPSPLMGGFGLKHPPPQILIKNTPVPANPPAEFSATKFASFITQYSTGQVSVEIEWELQKENSKRWNPEVQYTSNYAKSANVDFTVDNNGLYTEPRPIGTRYLTRPL

SEQ ID NO: 768 - protein, 736 aa, Artificial Sequence
  source: /note="Description of Artificial Sequence: Synthetic polypeptide"
MAADGYLPDWLEDNLSEGIREWWDLKPGAPKPKANQQKQDDGRGLVLPGYKYLGPFNGLDKGEPVNAADAAALEHDKAYDQQLKAGDNPYLRYNHADAEFQERLQEDTSFGGNLGRAVFQAKKRVLEPFGLVEEGAKTAPGKKRPVEQSPQEPDSSSGIGKTGQQPAKKRLNFGQTGDSESVPDPQPLGEPPATPAAVGPTTMASGGGAPMADNNEGADGVGNASGNWHCDSTWLGDRVITTSTRTWALPTYNNHLYKQISSASTGASNDNHYFGYSTPWGYFDFNRFHCHFSPRDWQRLINNNWGFRPKRLNFKLFNIQVKEVTTNDGVTTIANNLTSTVQVFSDSEYQLPYVLGSAHQGCLPPFPADVFMIPQYGYLTLNNGSQAVGRSSFYCLEYFPSQMLRTGNNFTFSYTFEEVPFHSSYAHSQSLDRLMNPLIDQYLYYLNRTQNQSGSAQNKDLLFSRGSPAGMSVQPKNWLPGPCYRQQRVSKTKTDNNNSNFTWTGASKYNLNGRESIINPGTAMASHKDDEDKFFPMSGVMIFGKESAGASNTALDNVMITDEEEIKATNPVATERFGTVAVNFQSSSTDPATGDVHVMGALPGMVWQDRDVYLQGPIWAKIPHTDGHFHPSPLMGGFGLKHPPPQILIKNTPVPANPPAEFSATKFASFITQYSTGQVSVEIEWELQKENSKRWNPEVQYTSNYAKSANVDFTVDNNGLYTEPRPIGTRYLTRPL

SEQ ID NO: 769 - protein, 736 aa, Artificial Sequence
  source: /note="Description of Artificial Sequence: Synthetic polypeptide"
  MOD_RES (102)..(102): Any amino acid
MAADGYLPDWLEDNLSEGIREWWDLKPGAPKPKANQQKQDDGRGLVLPGYKYLGPFNGLDKGEPVNAADAAALEHDKAYDQQLKAGDNPYLRYNHADAEFQXRLQEDTSFGGNLGRAVFQAKKRVLEPFGLVEEGAKTAPGKKRPVEQSPQEPDSSSGIGKTGQQPAKKRLNFGQTGDSESVPDPQPLGEPPATPAAVGPTTMASGGGAPMADNNEGADGVGNASGNWHCDSTWLGGRVITTSTRTWALPTYNNHLYKQISSASTGASNDNHYFGHSTPWGYFDFNRFHCHFSPRDWQRLINNNWGFRPKRLNFKLFNIQVKEVTTNDGVTTIANNLTSTVQVFSDSEYQLPYVLGSAHQGCLPPSPADVFMIPQYGYLTLNNGSQAVGRSSFYCLEYFPSQMLRTGNNFTFSYTFEEVPFHSSYAHSQSLDRLMNPLIDQYLYYLNRTQNQSGSAQNKDLLFSRGSPAGMSVQPKNWLPGPCYRQQRVSKTKTDNNNSNFTWTGASKYNLNGRESIINPGTAMASHKDDKDKFFPMSGVMIFGKESAGASNTALDNVMITDEEEIKATNPVATERFGTVAVNFQSSNTDPATGDVHVMGALPGMVWQDRDVYLQGPIWAKIPHTDGHFHPSPLMGGFGLKHPPPQILIKNTPVPANPPAEFSATKFASFITQYSTGQVSVEIEWELQKENSKRWNPEVQYTSNYAKSANVDFTVDNNGLYTEPRPIGTRYLTRPL

SEQ ID NO: 770 - protein, 736 aa, Artificial Sequence
  source: /note="Description of Artificial Sequence: Synthetic polypeptide"
MAADGYFPDWLEDNLSEGIREWWDLKPGAPKPKANQQKQDDGRGLVLPGYKYLGPFNGLDKGEPVNAADAAALEHDKAYDQQLKAGDNPYLRYNHADAEFQERLQEDTSFGGNLGRAVFQAKKRVLEPFGLVEEGAKTAPGKKRPVEQSPQEPDSSSGIGRTGQQPAKKRLNFGQTGDSESVPDPQPLGEPPATPAAVGPTTMASGGGAPMADNNEGADGVGNASGNWHCDSTWLGDRVITTSTRTWALPTYNNHLYKQISSASTGASNDNHYFGYSTPWGYFDFNRFHCHFSPRDWQRLINNNWGFRPKRLNFKLFNIQVKEVTTNDGVTTIANNLTSTVQVFSDSEYQLPYVLGSAHQGCLPPFPADVFMIPQYGYLTLNNGSQAVGRSSFYCLEYFPSQMLRTGNNFTFSYTFEEVPFHSSYAHSQSLDRLMNPLIDQYLYYLNRTQNQSGSAQNKDLLFSRGSPAGMSVQPKNWLPGPCYRQQRVSKTKTDNNNSNFTWTGASKYNLNGRESIINPGTAMASHKDDEDKFFPMSGVMIFGKESAGASNTALDNVMITDEEEIKATNPVATERFGTVAVNFQSSSPDPATGDVHVMGALPGMVWQDRDVYLQGPIWAKIPHTDGHFHPSPLMGGFGLKHPPPQILIKNTPVPANPPAEFSATKFASFITQYSTGQVSVEIEWELQKENSKRWNPEVQYTSNYAKSANVDFTVDNNGLYSEPRPIGTRYLTRPL

SEQ ID NO: 771 - protein, 736 aa, Artificial Sequence
  source: /note="Description of Artificial Sequence: Synthetic polypeptide"
MAADGYLPDWLEDNLSEGIREWWDLKPGAPKPKANQQKQDDGRGLVLPGYKYLGPFNGLDKGEPVNAADAAALEHDKAYDQQLKAGDNPYLRYNHADAEFQERLQEDTSFGGNLGRAVFQAKKRVLEPFGLVEEGAKTAPGKKRPVEQSPQEPDSSSGIGKTGQQPAKKRLNFGQTGDSESVPDPQPLGEPPATPAAVGPTTMASGGGAPMADNNEGADGVGNASGNWHCDSTWLGDRVITTSTRTWALPTYNNHLYKQTSSASTGASNDNHYFGYSTPWGYFDFNRFHCHFSPRDWQRLINNNWGFRPKRLNFKLFNIQVKEVTTNDGVTTIANNLTSTVQVFSDSEYQLPYVLGSAHQGCLPPFPADVFMIPQYGYLTLNNGSQAVGRSSFYCLEYFPSQMLRTGNNFTFSYTFEEVPFHSSYAHSQSLDRLMNPLIDQYLYYLNRTQNQSGSAQNKDLLFSRGSPAGMSVQPKNWLPGPCYRQQRVSKTKTDYNNSNFTWTGASKYNLNGRESIINPGTAMASHKDDEDKFFPMSGVMIFGKESAGASNTALDNVMITDEEEIKATNPVATERFGTVAVNFQSSSTDPATGDVHVMGALPGMVWQDRDVYLQGPIWAKIPHTDGHFHPSPLMGGFGLKHPPPQILIKNTPVPANPPAEFSATKFASFITQYSTGQVSVEIEWELQKENSKRWNPEVQYTSNYAKSANVDFTVDNNGLYTEPRPIGTRYLTRPL

SEQ ID NO: 772 - protein, 736 aa, Artificial Sequence
  source: /note="Description of Artificial Sequence: Synthetic polypeptide"
MAADGYPPDWLEDNLSEGIREWWDLKPGVPKPKANQQKQDDGRGLVLPGYKYLGPFNGLDKGEPVNAADAAALEHDKAYDQQLKAGDNPYLRYNHADAEFQERLQEDTSFGGNLGRAVFQAKKRVLEPFGLVEEGAKTAPGKKRPVEQSPQEPDSSSGIGKTGQQPAKKRLNFGQTGDSESVPDPQPLGEPPATPAAVGPTTMASGGGAPMADNNEGADGVGNASGNWHCDSTWLGDRVITTSTRTWALPTYNNHLYKQISSASTGASNDNHYFGYSTPWGYFDFNRFHCHFSPRDWQRLINNNWGFRPKRLNFKLFNIQVKEVTTNDGVTTIANNLTSTVQVFSDSEYQLPYVLGSAHQGCLPPFPADVFMIPQYGYLTLNNGSQAVGRSSFYCLEYFPSQMLRTGNNFTFSYTFEEVPFHSSYAHSQSLDRLMNPLIDQYLYYLNRTQNQSGSAQNKDLLFSRGSPAGMSVQPKNWLPGPCYRQQRVSKTKTDNNNSNFTWTGASKYNLNGRESIINPGTAMASHKDDEDKFFPMSGVMIFGKESAGASNTALDNVMITDEEEIKATNPVATERFGTVAVNFQSSSTDPATGDVHVMGALPGMVWQDRDVYLQGPIWAKIPHTDGHFHPSPLMGGFGLKHPPPQILIKNTPVPANPPAEFSATKFASFITQYSTGQVSVEIEWELQKENSKRWNPEVQYTSNYAKSANVDFTVDNNGLYTEPRPIGTRYLTRPL

SEQ ID NO: 773 - protein, 732 aa, Artificial Sequence
  source: /note="Description of Artificial Sequence: Synthetic polypeptide"
MAADGYLPDWLEDNLSEGIREWWDLKPGAPKPKANQQKQDDGRGLVLPGYKYLGPFNGLDKGEPVNAADAAALEHDKAYDQQLKAGDNPYLRYNHADAEFQERLQEDTSFGGNLGRAVFQAKKRVLEPFGLVEEGAKTAPGKKRPVEQSPQEPDSSSGIGKTGQQPAKKRLNFGQTGDSESVPDPQPLGEPPATPAAVGPTTMASGGGAPMADNNEGADGVGNASGNWHCDSTWLGDRVITTSTRTWALPTYNNHLYKQISSASTGASNDNHYFGYSTPWGYFDFNRFHCHFSPRDWQRLINNNWGFRPKRLNFKLFNIQVKEVTTNDGVTTIANNLTSTVQAFSDSEYQLPYVLGSAHQGCLPPFPADVFMIPQYGYLTLNNGSQAVGRSSFYCLEYFPSQMLRTGNNFTFSYTFEEVPFHSSYAHSQSLDRLMNPLIDPYLYYLNRTQNQSGSAQNKDLLFSRGSPAGMSVQPKNWLPGPCYRQQRVSKTKTDNNNSNFTWTGASKYNLNGRESIINPGTAMASHKDDEDKFFPMSGVMIFGKESAGASNTALDNVMITDEEEIKATNPVATERFGTVAVNFQSSSTDPATGDVHVMGALPGMVWQDRDVYLQGPIWAKIPHTDGHFHPSPLMGGFGLKHPPPQILIKNTPVPANPPAEFSATKFASFITQYSTGQVSVEIEWELQKENSKRWNPEVQYTSNYAKSANVDFTVDNNGLYTEPRPIGTRYL

SEQ ID NO: 774 - protein, 736 aa, Artificial Sequence
  source: /note="Description of Artificial Sequence: Synthetic polypeptide"
MAADGYLPDWLEDNLSEGIREWWDLKPGAPKPKANQQKQDDGRGLVLPGYKYLGPFNGLDKGEPVNAADAAALEHDKAYDQQLKAGDNPYLRYNHADAEFQERLQEDTSFGGNLGRAVFQAKKRVLEPFGLVEEGAKTAPGKKRPVEQSPQEPDSSSGIGKTGQQPAKKRLNFGQTGDSESVPDPQPLGEPPATPAAVGPTTMASGGGAPMADNNEGADGVGNASGNWHCDSTWLGDRVITTSTRTWALPTYNNHLYKQISSASTGASNDNHYFGYSTPWGYFDFNRFHCHFSPRDWQRLINNNWGFRPKRLNFKLFNIQVKEVTTNDGVTTIANNLTSTVQVFSDSEYQLPYVLGSAHQGCLPPFPADVFMIPQYGYLTLNNGSQAVGRSSFYCLEYFPSQMLRTGNNFTFSYTFEEVPFHSSYAHSQSLDRLMNPLIDQYLYYLNRTQNQSGSAQNKDLLFSRGSPAGMSVQPKNWLPGPCYRQQRVSKTKTDNNNSNFTWTGASKYNLNGRESIINPGTAMASHKDDEDKFFPMSGVMIFGKESAGASNTALDNVMITDEEEIKATNPVATERFGTVAVNFQSSSTDPATGDVHVMGALPGMVWQDRDVYLQGPIWAKIPHTDGHSHPSPLMGGFGLKHPPPQILIKNTPVPANPPAEFSATKFASFITQYSTGQVSVEIEWELQKENSKRWNPEVQYTSNYAKSANVDFTVDNNGLYTEPRPIGTRYLTRPL

SEQ ID NO: 775 - protein, 736 aa, Artificial Sequence
  source: /note="Description of Artificial Sequence: Synthetic polypeptide"
MAADGYLPDWLEDNLSEGIREWWDLKPGAPKPKANQQKQDDGRGLVLPGYKYLGPFNGLDKGEPVNAADAAALEHDKAYDQQLKAGDNPYLRYNHADAEFQERLQEDTSFGGNLGRAVFQAKKRVLEPFGLVEEGAKTAPGKKRPVEQSPQEPDSSSGIGKTGQQPAKKRLNFGQTGDSESVPDPQPLGEPPATPAAVGPTTMASGGGAPMADNNEGADGVGNASGNWHCDSTWLGDRVITTSTRTWALPTYNNHLYKQISSASTGASNDNHYFGYSTPWGYFDFNRFHCHFSPRDWQRLINNNWGFRPKRLNFKLFNIQVKEVTTNDGVTTIANNLTSTVQVFSDSEYQLPYVLGSAHQGCLPPFPADVFMIPQYGYLTLNNGSQAVGRSSFYCLEYFPSQMLRTGNNFTFSYTFEEVPFHSSYAHSQSLDRLMNPLIDLYLYYLNRTQNQSGSAQNKDLLFSRGSPAGMSVQPKNWLPGPCYRQQRVSKTKTDNNNSNFTWTGASKYNLNGRESIINPGTAMASHKDDEDKFFPMSGVMIFGKESAGTSNTALDNVMITDEEEIKATNPVATERFGTVAVNFQSSSTDPATGDVHVMGALPGMVWQDRDVYLQGPIWAKIPHTDGHFHPSPLMGGFGLKHPPPQILIKNTPVPANPPAEFSATKFASFITQYSTGQVSVEIEWELQKENSKRWNPEVQYTSNYAKSANVDFTVDNNGLYTEPRPIGTRYLTRPL

SEQ ID NO: 776 - protein, 736 aa, Artificial Sequence
  source: /note="Description of Artificial Sequence: Synthetic polypeptide"
MAADGYLPDWLEDSLSEGIREWWDLKPGAPKPKANQQKQDDGRGLVLPGYKYLGPFNGLDKGEPVNAADAAALEHDKAYDQQLKAGDNPYLRYNHADAEFQERLQEDTSFGGNLGRAVFQAKKRVLEPFGLVEEGAKTAPGKKRPVEQSPQEPDSSSGIGKTGQQPAKKRLNFGQTGDSESVPDPQPLGEPPATPAAVGPTTMASGGGAPMADNNEGADGVGNASGNWHCDSTWLGDRVITTSTRTWALPTYNNHLYKQISSASTGASNDNHYFGYSTPWGYFDFNRFHCHFSPRDWQRLINNNWGFRPKRLNFKLFNIQVKEVTTNDGVTTIANNLTSTVQVFSDSEYQLPYVLGSAHQGCLPPFPADVFMIPQYGYLTPNNGSQAVGRSSFYCLEYFPSQMLRTGNNFTFSYTFEEVPFHSSYAHSQSLDRLMNPLIDQYQYYLNRTQNQSGSAQNKDLLFSRGSPAGMSVQPKNWLPGPCYRQQRVSKTKTDNNNSNFTWTGASKYNLNGRESIINPGTAMASHKDDEDKFFPMSGVMIFGKESAGASNTALDNVMITDEEEIKATNPVATERFGTVAVNFQSSSTDPATGDVHVMGALPGMVWQDRDVYLQGPIWAKIPHTDGHFHPSPLMGGFGLKHPPPQILIKNTPVPANPPAEFSATKFASFITQYSTGQVSVEIEWELQKENSKRWNPEVQYTSNYAKSANVDFTVDNNGLYTEPRPIGTRYLTRPL

SEQ ID NO: 777 - protein, 736 aa, Artificial Sequence; identical to SEQ ID NO: 768
  source: /note="Description of Artificial Sequence: Synthetic polypeptide"

SEQ ID NO: 778 - protein, 735 aa, Artificial Sequence
  source: /note="Description of Artificial Sequence: Synthetic polypeptide"
MAADGYLPDWLEDTLSEGIRQWWKLKPGPPPPKPAERHKDDSRGLVLPGYKYLGPFNGLDKGEPVNEADAAALEHDKAYDRQLDSGDNPYLKYNHADAEFQERLKEDTSFGGNLGRAVFQAKKRVLEPLGLVEEPVKTAPGKKRPVEHSPVEPDSSSGTGKAGQQPARKRLNFGQTGDADSVPDPQPLGQPPAAPSGLGTNTMATGSGAPMADNNEGADGVGNSSGNWHCDSTWMGDRVITTSTRTWALPTYNNHLYKQISSQSGASNDNHYFGYSTPWGYFDFNRFHCHFSPRDWQRLINNNWGFRPKRLNFKLFNIQVKEVTQNDGTTTIANNLTSTVQVFTDSEYQLPYVLGSAHQGCLPPFPADVFMVPQYGYLTLNNGSQAVGRSSFYCLEYFPSQMLRTGNNFTFSYTFEDVPFHSSYAHSQSLDRLMNPLIDQYLYYLSRTNTPSGTTTQSRLQFSRAGASDIRDQSRNWLPGPCYRQQRVSKTSADNNNSEYSWTGATKYHLNGRDSLVNPGPAMASHKDDEEKFFPQSGVLIFGKQGSEKTNVDIEKVMITDEEEIRTTNPVATEQYGSVSTNLQRGNRQAATADVNTQGVLPGMVWQDRDVYLQGPIWAKIPHTDGHFHPSPLMGGFGLKHPPPQILIKNTPVPANPSTTFSAAKFASFITQYSTGQVSVEIEWELQKENSKRWNPEIQYTSNYNKSVNVDFTVDTNGVYSEPRPIGTRYLTRNL

SEQ ID NO: 779 - DNA, 2211 bp, Artificial Sequence
  source: /note="Description of Artificial Sequence: Synthetic polynucleotide"
atggctgctgacggttatcttccagattggctcgaggacaacctttctgaaggcattcgtgagtggtgggctctgaaacctggagtccctcaacccaaagcgaaccaacaacaccaggacaaccgtcggggtcttgtgcttccgggttacaaatacctcggacccggtaacggactcgacaaaggagagccggtcaacgaggcggacgcggcagccctcgaacacgacaaagcttacgaccagcagctcaaggccggtgacaacccgtacctcaagtacaaccacgccgacgccgagtttcaggagcgtcttcaagaagatacgtcttttgggggcaaccttggcagagcagtcttccaggccaaaaagaggatccttgagcctcttggtctggttgaggaagcagctaaaacggctcctggaaagaagaggcctgtagatcagtctcctcaggaaccggactcatcatctggtgttggcaaatcgggcaaacagcctgccagaaaaagactaaatttcggtcagactggcgactcagagtcagtcccagaccctcaacctctcggagaaccaccagcagcccccacaagtttgggatctaatacaatggcttcaggcggtggcgcaccaatggcagacaataacgagggtgccgatggagtgggtaattcctcaggaaattggcattgcgattcccaatggctgggcgacagagtcatcaccaccagcaccagaacctgggccctgcccacttacaacaaccatctctacaagcaaatctccagccaatcaggagcttcaaacgacaaccactactttggctacagcaccccttgggggtattttgactttaacagattccactgccacttctcaccacgtgactggcagcgactcattaacaacaactggggattccggcccaagaaactcagcttcaagctcttcaacatccaagttaaagaggtcacgcagaacgatggcacgacgactattgccaataaccttaccagcacggttcaagtgtttacggactcggagtatcagctcccgtacgtgctcgggtcggcgcaccaaggctgcctcccgccgtttccagcggacgtcttcatggtccctcagtatggatacctcaccctgaacaacggaagtcaagcggtgggacgctcatccttttactgcccggagtacttcccttcgcagatgctaaggactggaaataacttccaattcagctataccttcgaggatgtaccttttcacagcagctacgctcacagccagagtttggatcgcttgatgaatcctcttattgatcagtatctgtactacctgaacagaacgcaaggaacaacctctggaacaaccaaccaatcacggctgctttttagccaggctgggcctcagtctatgtctttgcaggccagaaattggctacctgggccctgctaccggcaacagagactttcaaagactgctaacgacaacaacaacagtaactttccttggacagcggccagcaaatatcatctcaatggccgcgactcgctggtgaatccaggaccagctatggccagtcacaaggacgatgaagaaaaatttttccctatgcacggcaatctaatatttggcaaagaagggacaacggcaagtaacgcagaattagataatgtaatgattacggatgaagaagagattcgtaccaccaatcctgtggcaacagagcagtatggaactgtggcaaataacttgcagagctcaaatacagctcccacgactagaactgtcaatgatcagggggccttacctggcatggtgtggcaagatcgtgacgtgtaccttcaaggacctatctgggcaaagattcctcacacggatggacactttcatccttctcctctgatgggaggctttggactgaaacatccgcctcctcaaatcatgatcaaaaatactccggtaccggcaaatcctccgacgactttcagcccggccaagtttgcttcatttatcactcagtactccactggacaggtcagcgtggaaattgagtgggagctacagaaagaaaacagcaaacgttggaatccagagattcagtacacttccaactacaacaagtctgttaatgtggactttactgtagacactaatggtgtttatagtgaacctcaccctattggaacccggtatctcacacgaaacttgtaa

SEQ ID NO: 780 - DNA, 2211 bp, Artificial Sequence
  source: /note="Description of Artificial Sequence: Synthetic polynucleotide"
atggctgctgatggttatcttccagattggctcgaggacaacctttctgaaggcattcgtgagtggtgggctctgaaacctggagtccctcaacccaaagcgaaccaacaacaccaggacaaccgtcggggtcttgtgcttccgggttacaaatacctcggacccggtaacggactcgacaaaggagagccggtcaacgaggcggacgcggcagccctcgaacacgacaaagcttacgaccagcagctcaaggccggtgacaacccgtacctcaagtacaaccacgccgacgccgagtttcaggagcgtcttcaagaagatacgtcttttgggggcaaccttggcagagcagtcttccaggccaaaaagaggatccttgagcctcttggtctggttgaggaagcagctaaaacggctcctggaaagaagaggcctgtagatcagtctcctcaggaaccggactcatcatctggtgttggcaaatcgggcaaacagcctgccagaaaaagactaaatttcggtcagactggcgactcagagtcagtcccagaccctcaacctctcggagaaccaccagcagcccccacaagtttgggatctaatacaatggcttcaggcggtggcgcaccaatggcagacaataacgagggtgccgatggagtgggtaattcctcaggaaattggcattgcgattcccaatggctgggcgacagagtcatcaccaccagcaccagaacctgggccctgcccacttacaacaaccatctctacaagcaaatctccagccaatcaggagcttcaaacgacaaccactactttggctacagcaccccttgggggtattttgactttaacagattccactgccacttctcaccacgtgactggcagcgactcattaacaacaactggggattccggcccaagaaactcagcttcaagctcttcaacatccaagttaaagaggtcacgcagaacgatggcacgacgactgttgccaataaccttaccagcacggttcaagtgtttacggactcggagtatcaactcccgtacgtgctcgggtcggcgcaccaaggctgtctcccgccgtttccagcggacgtcttcatggtccctcagtatggatacctcaccctgaacaacggaagtcaagcggtgggacgctcatccttttactgcctggagtacttcccttcgcagatgctaaggactggaaataacttccaattcagctataccttcgaggatgtaccttttcacagcagctacgctcacagccagagtttggatcgcttgatgaatcctcttattgatcagtatctgtactacctgaacagaacgcaaggaacaacctctggaacaaccaaccaatcacggctgctttttagccaggctgggcctcagtctatgtctttgcaggccagaaattggctacctgggccctgctaccggcaacagagactttcaaagactgctaacgacaacaacaacagtaactttccttggacagcggccagcaaatatcatctcaatggccgcgactcgctggtgaatccaggaccagctatggccagtcacaaggacgatgaagaaaaatttttccctatgcacggcaatctaatatttggcaaagaagggacaacggcaagtaacgcagaattagataatgtaatgattacggatgaagaagagattcgtaccaccaatcctgtggcaacagagcagtatggaactgtggcaaataacttgcagagctcaaatacagctcccacgactagaactgtcaatgatcagggggccttacctggcatggtgtggcaagatcgtgacgtgtaccttcaaggacctatctgggcaaagattcctcacacggatggacactttcatccttctcctctgatgggaggctttggactgaaacatccgcctcctcaaatcatgatcaaaaatactccggtaccggcaaatcctccgacgactttcagcccggccaagtttgcttcatttatcactcagtactccactggacaggtcagcgtggaaattgagtgggagctacagaaagaaaacagcaaacgttggaatccagagattcagtacacttccaactacaacaagtctgttaatgtggactttactgtagacactaatggtgtttatagtgaacctcgccctattggaacccggtatctcacacgaaacttgtaa

SEQ ID NO: 781 - DNA, 2211 bp, Artificial Sequence
  source: /note="Description of Artificial Sequence: Synthetic polynucleotide"
atggctgctgacggttatcttccagattggctcgaggacaacctttctgaaggcattcgtgagtggtgggctctgaaacctggagtccctcaacccaaagcgaaccaacaacaccaggacaaccgtcggggtcttgtgcttccgggttacaaatacctcggacccggtaacggactcgacaaaggagagccggtcaacgaggcggacgcggcagccctcgaacacgacaaagcttacgaccagcagctcaaggccggtgacaacccgtacctcaagtacaaccacgccgacgccgagtttcaggagcgtcttcaagaagatacgtcttttgggggcaaccttggcagagcagtcttccaggccaaaaagaggatccttgagcctcttggtctggttgaggaagcagctaaaacggctcctggaaagaagaggcctgtagatcagtctcctcaggaaccggactcatcatctggtgttggcaaatcgggcaaacagcctgccagaaaaagactaaatttcggtcagactggcgactcagagtcagtcccagaccctcaacctctcggagaaccaccagcagcccccacaagtttgggatctaatacaatggcttcaggcggtggcgcaccaatggcagacaataacgagggtgccgatggagtgggtaattcctcaggaaattggcattgcgattcccaatggctgggcgacagagtcatcaccaccagcaccagaacctgggccctgcccacttacaacaaccatctctacaagcaaatctccggccaatcaggagcttcaaacgacaaccactactttggctacagcaccccttgggggtattttgactttaacagattccactgccacttctcaccacgtgactggcagcgactcattaacaacaactggggattccggcccaagaaactcagcttcaagctcttcaacatccaagttaaagaggtcacgcagaacgatggcacgacgactattgccaataaccttaccagcacggttcaagtgtttacggactcggagtatcagctcccgtacgtgctcgggtcggcgcaccaaggctgtctcccgccgtttccagcggacgtcttcatggtccctcagtatggatacctcaccctgaacaacggaagtcaagcggtgggacgctcatccttttactgcctggagtacttcccttcgcagatgctaaggactggaaataacttccaattcagctataccttcgaggatgtaccttttcacagcagctacgctcacagccagagtttggatcgcttgatgaatcctcttattgatcagtatctgtactacctgaacagaacgcaaggaacaacctctggaacaaccaaccaatcacggctgctttttagccaggctgggcctcagtctatgtctttgcaggccagaaattggctacctgggccctgctaccggcaacagagactttcaaagactgctaacggcaacaacaacagtaactttccttggacagcggccagcaaatatcatctcaatggccgcgactcgctggtgaatccaggaccagctatggccagtcacaaggacgatgaagaaaaatttttccctatgcacggcaatctaatatttggcaaagaagggacaacggcaagtaacgcagaattagataatgtaatgattacggatgaagaagagattcgtaccaccaatcctgtggcaacagagcagtgtggaactgtggcaaataacttgcagagctcaaatacagctcccacgactagaactgtcaatgatcagggggccttacctggcatggtgtggcaagatcgtgacgtgtaccttcaaggacctatctgggcaaagattcctcacacggatggacactttcatccttctcctctgatgggaggctttggactgaaacatccgcctcctcaaatcatgatcaaaaatactccggtaccggcaaatcctccgacgactttcagcccggccaagtttgcttcatttatcactcagtactccactggacaggtcagcgtggaaattgagtgggagctacagaaagaaaacagcaaacgttggaatccagagattcagtacacttccaactacaacaagtctgttaatgtggactttactgtagacactaatggtgtttatagtgaacctcgccctattggaacccggtatctcacacgaaacttgtaa

SEQ ID NO: 782 - DNA, 2212 bp, Artificial Sequence
  source: /note="Description of Artificial Sequence: Synthetic polynucleotide"
  modified_base (1283)..(1283): a, c, t, or g
atggctgctgacggttatcttccagattggctcgaggacaacctttctgaaggcattcgtgagtggtgggctctgaaacctggagtccctcaacccaaagcgaaccaacaacaccaggacaaccgtcggggtcttgtgcttccgggttacaaatacctcggaccgggtaacggactcgacaaaggagagccggtcaacgaggcggacgcggcagccctcgaacacgacaaagcttacgaccagcagctcaaggccggtgacaacccgtacctcaagtacaaccacgccgacgccgagtttcaggagcgtcttcaagaagatacgtcttttgggggcaaccttggcagagcagtcttccaggccaaaaagaggatccttgagcctcttggtctggttgagggagcagctaaaacggctcctggaaagaagaggcctgtagatcagtctcctcaggaaccggactcatcatctggtgttggcaaatcgggcaaacagcctgccagaaaaagactaaatttcggtcagactggcgactcagagtcagtcccagaccctcaacctctcggagaaccaccagcagcccccacaagtttgggatctaatacaatggcttcaggcggtggcgcaccaatggcagacaataacgagggtgccgatggagtgggtaattcctcaggaaattggcattgcgattcccaatggctgggcgacagagtcatcaccaccagcaccagaacctgggccctgcccacttacaacagccatctctacaagcaaatctccagccaatcaggagcttcaaacgacaaccactactttggctacagcaccccttgggggtattttgactttaacagattccactgccacttctcaccacgtgactggcagcgactcattaacaacaactggggattccggcccaagaaactcagcttcaagctcttcaacatccaagttaaagaggtcacgcagaacgatggcacgacgactattgccaataaccttaccagcacggtccaagtgtttacggactcggagtatcagctcccgtacgtgctcgggtcggcgcaccaaggctgtctcccgccgtttccagcggacgccttcatggtccctcagtatggatacctcaccctgaacaacggaagtcaagcggtgggacgctcatccttttactgcctggagtacttcccttcgcagatgctaaggactggaaataacttccaattcagctataccttcgaggatgtaccttttcacggcagctacgctcacagccngagtttggatcgcttgatgaatcctcttattgatcagtatctgtactacctgaacagaacgcaaggaacaacctctggaacaaccaaccaatcacggctgctttttagccaggctgggcctcagtctatgtctttgcaggccagaaattggctacctgggccctgctaccggcaacagagacttttcaaagactgctaacgacaacaacaacagtaactttccttggacagcggccagcaaatatcatctcaatggccgcgactcgctggtgaatccaggaccagctatggccagtcacaaggacgatgaagaaaaatttttccctatgcacggcaatctaatatttggcaaagaagggacaacggcaagtaacgcagaattagataatgtaatgattacggatgaagaagagattcgtaccaccaatcctgtggcaacagagcagtatggaactgtggcaaataacttgcagagctcaaatacagctcccacgactagaactgtcaatgatcagggggccttacctggcatggtgtggcaagatcgtgacgtgtaccttcaaggacctatctgggcaaagattcctcacacggatggacactttcatccttctcctctgatgggaggctttggactgaaacatccgcctcctcaaatcatgatcaaaaatactccggtaccggcaaatcctccgacgactttcagcccggccaagtttgcttcatttatcactcagtactccactggacaggtcagcgtggaaattgagtgggagctacagaaagaaaacagcaaacgttggaatccagagattcagtacacttccaactacaacaagtctgttaatgtggactttactgtagacactaatggtgtttatagtgaacctcgccctattggaacccggtatctcacacgaaactcgtaa

SEQ ID NO: 783 - DNA, 2212 bp, Artificial Sequence
  source: /note="Description of Artificial Sequence: Synthetic polynucleotide"
atggctgctgacggttatcttccagattggctcgaggacaacctttctgaaggcattcgtgagtggtgggctctgaaacctggagtccctcaacccaaagcgaaccaacaacaccaggacaaccgtcggggtcttgtgcttccgggttacaaatacctcggacccggtaacggactcgacaaaggagagccggtcaacgaggcggacgcggcagccctcgaacacgacaaagcttacgaccagcagctcaaggccggtgacaacccgtacctcaagtacaaccacgccgacgccgagtttcaggagcgtcttcaagaagatacgtcttttgggggcaaccttggcagagcagtcttccaggccaaaaagaggatccttgagcctcttggtctggttgagggagcagctaaaacggctcctggaaagaagaggcctgtagatcagtctcctcaggaaccggactcatcatctggtgttggcaaatcgggcaaacagcttgccagaaaaagactaaatttcggtcagactggcgactcagagtcagtcccagaccctcaacctctcggagaaccaccagcagcccccacaagtttgggatctaatacaatggcttcaggcggtggcgcaccaatggcagacaataacgagggtgccgatggagtgggtaattcctcaggaaattggcattgcgattcccaatggctgggcgacagagtcatcaccaccagcaccagaacctgggccctgcccacttacaacagccatctctacaagcaaatctccggccaatcaggagcttcaaacgacaaccactactttggctacagcaccccctgggggtattttgactttaacagattccactgccacttctcaccacgtgactggcagcgactcattaacaacaactggggattccggcccaagaaactcagcttcaagctcttcaacatccaagttaaagaggtcacgcagaacgatggcacgacgactattgccaataaccttaccagcacggttcaagtgtttacggactcggagtatcagctcccgtacgtgctcgggtcggcgcaccaaggctgtctcccgccgtttccagcggacgtcttcatggtccctcagtatggatacctcaccctgaacaacggaagtcaagcggtgggacgctcatccttttactgcctggagtacttcccttcgcagatgctaaggactggaaataacttccaattcagctataccttcgaggatgtaccttttcacagcagctacgctcacagccagagtttggatcgcttgatgaatcctcttattgatcagtatctgtactacctgaacagaacgcaaggaacaacctctggaacaaccaaccaatcacggctgctttttagccaggctgggcctcagtctatgtctttgcaggccagaaattggctacctgggccctgctaccggcaacagagactttcaaagactgctaacgacaacaacaacagtaactttccttggacagcggccagcaaatatcatctcaatggccgcgactcgctggtgaatcccaggaccagctatggccagtcacaaggacgatgaagaaaaatttttccctatgcacggcaatctaatatttggcaaagaagggacaacggcaagtaacgcagaattagataatgtaatgattacggatgaagaagagattcgtaccaccaatcctgtggcaacagagcagtatggaactgtggcaaataacttgcagagctcaaatacagctcccacgactagaactgtcaatgatcagggggccttacctggcatggtgtggcaagatcgtgacgtgtaccttcaaggacctatctgggcaaagattcctcacacggatggacactttcatccttctcctctgatgggaggctttggactgaaacatccgcctcctcaaatcatgatcaaaaatactccggtaccggcaaatcctccgacgactttcagcccggccaagtttgcttcatttatcactcagtactccactggacaggtcagcgtggaaattgagtgggagctacagaaagaaaacagcaaacgttggaatccagagattcagtacacttccaactacaacaagtctgttaatgtggactttactgtagacactaatggtgtttatagtgaacctcgccctattggaacccggtatctcacacgaaacttgtaa

SEQ ID NO: 784 - DNA, 2212 bp, Artificial Sequence
  source: /note="Description of Artificial Sequence: Synthetic polynucleotide"
atggctgctgacggttatcttccagattggctcgaggacaacctttctgaaggcattcgtgagtggtgggctctgaaacctggagtccctcaacccaaagcgaaccaacaacaccaggacgaccgtcggggtcttgtgcttccgggttacaaatacctcggacccggtaacggactcgacaaaggagagccggtcaacgaggcggacgcggcagccctcgaacacgacaaagcttacgaccagcagctcaaggccggtgacaacccgtgcctcaagtacaaccacgccgacgccgagtttcaggagcgtcttcaagaagatacgtcttttgggggcaaccttggcagagcagtcttccaggccaaaaagaggatccttgagcctcttggtctggttgaggaagcagctaaaacggctcctggaaagaagaggcctgtagatcagtctcctcaggaaccggactcatcatctggtgttggcaaatcgggcaaacagcctgccagaaaaagactaaatttcggtcagactggcgactcagagtcagtcccagaccctcaacctctcggagaaccaccagcagcccccacaagtttgggatctaatacaatggcttcaggcggtagcgcaccaatggcagacaataacgagggtgccgatggagtgggtaattcctcaggaaattggcattgcgattcccaatggctgggcgacagagtcatcaccaccagcaccagaacctgggccctgcccacttacaacaaccatctctacaagcaaatctccagccaatcaggagcttcaaacgacaaccactactttggctacagcaccccttgggggtattttgactttaacagattccactgccacttctcaccacgtgactggcagcgactcattaacaacaactggggattccggcccaagaaactcagcttcaagctcttcaacatccaagttaaagaggtcacgcagaacgatggcacgacgactattgccaataaccttaccagcacggttcaagtgtttacggactcggagtatcagctcccgtacgtgctcgggtcggcgcaccaaggctgtctcccgccgtttccagcggacgtcttcatggtccctcagtatggatacctcaccctgaacaacggaagtcaagcggtgggacgctcatccttttactgcctggagtacttcccttcgcagatgctaaggactggaaataacttccaattcagctataccttcgaggatgtaccttttcacagcagctacgctcacagccagagtttggatcgcttgatggatcctcttattgatcagtatctgtactacctgaacagaacgcaaggaacaacctctggaacaaccaaccaatcacggctgctttttagccaggctgggcctcagtctatgtctttgcaggccagaaattggctacctgggccctgctaccggcaacagagactttcaaagactgctaacgacaacaacaacagtaactttccttggacagcggccagcaaatatcatctcaatggccgcgactcgctggtgaatccaggaccagctatggccagtcacaaaggacgatgaagaaaaatttttccctatgcacggcaatctaatatttggcaaagaagggacaacggcaagtaacgcagaattagataatgtaatgattacggatgaagaagagattcgtaccaccaatcctgtggcaacagagcagtatggaactgtggcaaataacttgcagagctcaaatacagctcccacgactagaactgtcaatgatcagggggccttacctggcatggtgtggcaagatcgtgacgtgtaccttcaaggacctatctgggcaaagattcctcacacggatggacactttcatccttctcctctgatgggaggctttggactgaaacatccgcctcctcaaatcatgatcaaaaatactccggtaccggcaaatcctccgacgactttcagcccggccaagtttgcttcatttatcactcagtactccactggacaggtcagcgtggaaattgagtgggagctacagaaagaaaacagcaaacgttggaatccagagattcagtacacttccaactacaacaagtctgttaatgtggactttactgtagacactaatggtgtttatagtgaacctcgccctattggaacccggtatctcacacgaaacctgtaa

SEQ ID NO: 785 - DNA, 2211 bp, Artificial Sequence
  source: /note="Description of Artificial Sequence: Synthetic polynucleotide"
atggctgctgacggttatcttccagattggctcgaggacaacctttctgaaggcattcgtgagtggtgggctctgaaacctggagtccctcaacccaaagcgaaccaacaacaccaggacgaccgtcggggtcttgtgcttccgggttacaaatacctcggacccggtaacggactcgacaaaggagagccggtcaacgaggcggacgcggcagccctcgaacacgacaaagcttacgaccagcagctcaaggccggtgacaacccgtacctcaagtacaaccacgccgacgccgagtttcaggagcgtcttcaagaagatacgtcttttgggggcaaccttggcagagcagtcttccaggccaaaaagaggatccttgagcctcttggtctggttgaggaagcagctaaaacggctcctggaaagaagaggcctgtagatcagtctcctcaggaaccggactcatcatctggtgttggcaaatcgggcaaacagcctgccagaaaaagactaaatttcggtcagactggcgactcagagtcagtcccagaccctcaacctctcggagaaccaccagcagcccccacaagtttgggatctaatacaatggcttcaggcggtggcgcaccaatggcagacaataacgagggtgccgatggagtgggtaattcctcaggaaattggcattgcgattcccaatggctgggcaacagagtcatcaccaccagcaccagaacctgggccctgcccacttacaacaaccatctctacaagcaaatctccagccaatcaggagcttcaaacgacaaccactactttggctacagcaccccttgggggtattttgactttaacagattccactgccacttctcaccacgtgactggcagcgactcattaacaacaactggggattccggcccaagaaactcagcttcaagctcttcaacatccaagttaaagaggtcacgcagaacgatggcacgacgactattgccaataaccttaccagcacggttcaagtgtttacggactcggagtatcagctcccgtacgtgctcgggtcggcgcaccaaggctgtctcccgccgtttccagcggacgtcttcatggtccctcagtatggatacctcaccctgaacaacggaagtcaagcggtgggacgctcatccttttactgcctggagtacttcccttcgcagatgctaaggactggaaataacttccaattcagctataccttcgaggatgtaccttttcacagcagctacgctcacagccagagtttggatcgcttgatgaatcctcttattgatcagtatctgtactacctgaacagaacgcaaggaacaacctctggaacaaccaaccaatcacggctgctttttagccaggctgggcctcagtctatgtctttgcaggccagaaattggctacctgggccctgctaccggcaacagagactttcaaagactgctaacgacaacaacaacagtaactttccttggacagcggccagcaaatatcatctcaatggccgcgactcgctggtgaatccaggaccagctatggccagtcacaaggacgatgaagaaaaatttttccctatgcacggcaatctaatatttggcaaagaagggacaacggcaagtaacgcagaattagataatgtaatgattacggatgaagaagagattcgtaccaccaatcctgtggcaacagagcagtatggaactgtggcaaataacttgcagagctcaaatacagctcccacgactagaactgtcaatgatcagggggccttacctggcatggtgtggcaagatcgtgacgtgtaccttcaaggacctatctgggcaaagattcctcacacggatggacactttcatccttctcctctgatgggaggctttggactgaaacatccgcctcctcaaatcatgatcaaaaatactccggtaccggcaaatcctccgacgactttcagcccggccaagtttgcttcatttatcactcagtactccactggacaggtcagcgtggaaattgagtgggagctacagaaagaaaacagcaaacgttggaatccagagattcagtacacttccaactacaacaagtctgttaatgtggactttactgtagacactaatggtgtttatagtgaacctcgccctattggaacccggtatctcacacgaaacttgtaa

SEQ ID NO: 786 - DNA, 2211 bp, Artificial Sequence
  source: /note="Description of Artificial Sequence: Synthetic polynucleotide"
atggctgctgacggttatcttccagattggctcgaggacaacctttctgaaggcattcgtgagtggtgggctctgaaacctggagtccctcaacccaaagcgaaccaacaacaccaggacgaccgtcggggtcttgtgcttccgggttacaaatacctcggacccggtaacggactcgacaaaggagagccggtcaacgaggcggacgcggcagccctcgaacacgacaaagcttacgaccagcagctcaaggccggtgacaacccgtacctcaagtacaaccacgccgacgccgagtttcaggagcgtcttcaagaagatacgtcttttgggggcaaccttggcagagcagtcttccaggccaaaaagaggatccttgagcctcttggtctggttgaggaagcagctaaaacggctcctggaaagaagaggcctgtagatcagtctcctcaggaaccggactcatcatctggtgttggcaaatcgggcaaacagcctgccagaaaaagactaaatttcggtcagactggcgactcagagtcagtcccagaccctcaacctctcggagaaccaccagcagcccccacaagtttgggatctaatacaatggcttcaggcggtggcgcaccaatggcggacaataacgagggtgccgatggagtgggtaattcctcaggaaattggcattgcgattcccaatggctgggcgacagagtcatcaccaccagcaccagaacctgggccctgcccacttacaacaaccatctctacaagcaaatctccagccaatcaggagcttcaaacgacaaccactactttggctacagcaccccttgggggtattttgactttaacagattccactgccacttctcaccacgtgactggcagcgactcattaacaacaactggggattccggcccaagaaactcagcttcaagctcttcaacatccaagttaaagaggtcacgcagaacgatggcacgacgactattgccaataaccttaccagcacggttcaagtgtttacggactcggagtatcagctcccgtacgtgctcgggtcggcgcaccaaggctgtctcccgccgtttccagcggacgtcttcatggtccctcagtatggatacctcaccctgaacaacggaagtcaagcggtgggacgctcatccttttactgcctggagtacttcccttcgcagatgctaaggactggaaataacttccaattcagctataccttcgaggatgtaccttttcacagcagctacgctcacagccagagtttggatcgcttgatgaatcctcttattgatcagtatctgtactacctgaacagaacgcaaggaacaacctctggaacaaccaaccaatcacggctgctttttagccaggctgggcctcagtctatgtctttgcaggccagaaattggctacctgggccctgctaccggcaacagagactttcaaagactgctaacgacaacaacaacagtaactttccttggacagcggccagcaaatatcatctcaatggccgcgactcgctggtgaatccaggaccagctatggccagtcacaaggacgatgaagaaaaatttttccctatgcacggcaatctaatatttggcaaagaagggacaacggcaagtaacgcagaattagataatgtaatgattacggatgaagaagagattcgtaccaccaatcctgtggcaacagtgcagtatggaactgtggcaaataacttgcagagctcaaatacagctcccacgactagaactgtcaatgatcagggggccttacctggcatggtgtggcaagatcgtgacgtgtaccttcaaggacctatctgggcaaagattcctcacacggatggacactttcatccttctcctctgatgggaggctttggactgaaacatccgcctcctcaaatcatgatcaaaaatactccggtaccggcaaatcctccgacgactttcagcccggccaagtttgcttcatttatcactcagtactccactggacaggtcagcgtggaaattgagtgggagctacagaaagaaaacagcaaacgttggaatccagagattcagtacacttccaactacaacaagtctgttaatgtggactttactgtagacactaatggtgtttatagtgaacctcgccctattggaacccggtatctcacacgaaacttgtaa

SEQ ID NO: 787 - DNA, 2211 bp, Artificial Sequence
  source: /note="Description of Artificial Sequence: Synthetic polynucleotide"
atggctgctgacggttatcttccagattggctcgaggacaacctttctgaaggcattcgtgagtggtgggctctgaaacctggagtccctcaacccaaagcgaaccaacaacaccaggacaaccgtcggggtcttgtgcttccgggttacaaatacctcggacccggtaacggactcgacaaaggagagccggtcaacgaggcggacgcggcagccctcgaacacgacaaagcttacgaccagcagctcaaggccggtgacaacccgtacctcaagtacaaccacgccgacgccgagtttcaggagcgtcttcaagaagatacgtcttttgggggcaaccttggcagagcagtcttccaggccaaaaaggggatccttgagcctcttggtctggttgaggaagcagctaaaacggctcctggaaagaagaggcctgtagatcagtctcctcaggaaccggactcatcatctggtgttggcaaatcgggcaaacagcctgccagaaaaagactaaatttcggtcagactggcgactcagagtcagtcccagaccctcaacctctcggagaaccaccagcagcccccacaagtttgggatctaatacaatggcttcaggcggtggcgcaccaatggcagacaataacgagggtgccgatggagtgggtaattcctcaggaaattggcattgcgattcccaatggctgggcgacagagtcatcaccaccagcaccagaacctgggccctgcccacttacaacaaccatctctacaagcaaatctccagccaatcaggagcttcaaacgacaaccactactttggctacagcaccccttgggggtattttgactttaacagattccactgccacttctcaccacgtgactggcagcgactcattaacaacaactggggattccggcccaagaaactcagcttcaagctcttcaacatccaagttaaagaggtcacgcagaacgatggcacgacgactattgccaataaccttaccagcacggttcaagtgtttacggactcggagtatcagctcccgtacgtgttcgggtcggcgcaccaaggctgtctcccgccgtttccagcggacgtcttcatggtccctcagtatggatacctcaccctgaacaacggaagtcaagcggtgggacgctcatccttttactgcctggagtacttcccttcgcagatgctaaggactggaaataacttccaattcagctataccttcgaggatgtaccttttcacagcagctacgctcacagccagagttcggatcgcttgatgaatcctcttattgatcagtatctgtactacctgaacagaacgcaaggaacaacctctggaacaaccaaccaatcacggctgctttttagccaggctgggcctcagtctatgtctttgcaggccagaaattggctacctgggccctgctaccggcaacagagactttcaaagactgctaacgacaacaacaacagtaactttccttgaacagcggccagcaaatatcatctcaatggccgcgactcgctggtgaatccaggaccagctatggccagtcacaaggacgatgaagaaaaatttttccctatgcacggcaatctaatatttggcaaagaagggacaacggcaagtaacgcagaattagataatgtaatgattacggatgaagaagagattcgtaccaccaatcctgtggcaacagagcagtatggaactgtggcaaataacttgcagagctcaaatacagctcccacgactagaactgtcaatgatcagggggccttacctggcatggtgtggcaagatcgtgacgtgtaccttcaaggacctatctgggcaaagattcctcacacggatggacactttcatccttctcctctgatgggaggctttggactgaaacatccgcctcctcaaatcatgatcaaaaatactccggtaccggcaaatcctccgacgactttcagcccggccaagtttgcttcatttatcactcagtactccactggacaggtcagcgtggaaattgagtgggagctacagaaagaaaacagcaaacgttggaatccagagattcagtacacttccaactacaacaagtctgttaatgtggactttactgtagacactaatggtgtttatagtgaacctcgccctattggaacccggtatctcacacgaaacttgtaa

SEQ ID NO: 788 - DNA, 2211 bp, Artificial Sequence
  source: /note="Description of Artificial Sequence: Synthetic polynucleotide"
atggctgctgacggttatcttccagattggctcgaggacaacctttctgaaggcattcgtgagtggtgggctctgaaacctggagtccctcaacccaaagcgaaccaacaacaccaggacaaccgtcggggtcttgtgcttccgggttacaaatacctcggacccggtaacggactcgacgaaggagagccggtcaacgaggcggacgcggcagccctcgaacacgacaaagcttacgaccagcagctcaaggccggtgacaacccgtacctcaagtacaaccacgccgacgccgagtttcaggagcgtcttcaagaagatacgtcttttgggggcaaccttggcagagcagtcttccaggccaaaaagaggatccttgagcctcttggtctggttgagggagcagctaaaacggctcctggaaagaagaggcctgtagatcagtctcctcaggaaccggactcatcatctggtgttggcaaatcgggcaaacagcctgccagaaaaagactaaatttcggtcagactggcgactcagagtcagtcccagaccctcaacctctcggagaaccaccagcagcccccacaagtttgggatctaatacaatggcttcaggcggtggcgcaccaatggcagacaataacgagggtgccgatggagtgggtaattcctcaggaaattggcattgcgattcccaatggctgggcgacagagtcatcaccaccagcaccagaacctgggccctgcccacttacaacagccacctctacaagcaaatctccagccaatcaggagcttcaaacgacaaccactactttggctacagcaccccttgggggtattttgactttaacagattccactgccacttctcaccacgtgactggcagcgactcattaacaacaactggggattccggcccaagaaactcagcttcaagctcttcaacatccaagttaaagaggtcacgcagaacgatggcacgacgactattgccaataaccttaccagcacggttcaagtgtttacggactcggagtatcagctcccgtacgtgctcgggtcggcgcaccaaggctgtctcccgccgtttccagcggacgtcttcatggtccctcagtatggatacctcaccctgaacaacggaagtcaagcggtgggacgctcatccttttactgcctggagtacttcccttcgcagatgctaaggactggaaataacttccaattcagctataccttcgaggatgtaccttttcacagcagctacgctcacagccagagtttggatcgcttgatgaatcctcttattgatcagtatctgtactacctgaacagaacgcaaggaacaacctctggaacaaccaaccaatcacggctgctttttagccaggctgggcctcagtctatgtctttgcaggccagaaattggctacctgggccctgctaccggcaacagagactttcaaagactgctaacgacaacaacaacagtaactttccttggacagcggccagcaaatatcatctcaatggccgcgactcgctggtgaatccaggaccagctatggccagtcacaaggacgatgaagaaaaatttttccctatgcacggcaatctaatatttggcaaagaagggacaacggcaagtaacgcagaattagataatgtaatgattacggatgaagaagagattcgtaccaccaatcctgtggcaacagagcagtatggaactgtggcaaataacttgcagagctcaaatacagctcccacgactagaactgtcaatgatcagggggccttacctggcatggtgtggcaagatcgtgacgtgtaccttcaaggacctatctgggcaaagattcctcacacggatggacactttcatccttctcctctgatgggaggctttggactgaaacatccgcctcctcaaatcatgatcaaaaatactccggtaccggcaaatcctccgacgactttcagcccggccaagtttgcttcatttatcactcagtactccactggacaggtcagcgtggaaattgagtgggagctacagaaagaaaacagcaaacgttggaatccagagattcagtacacttccaactacaacaagtctgttaatgtggactttactgtagacactaatggtgtttatagtgaacctcgccctattggaacccggtatctcacacgaaacttgtaa

SEQ ID NO: 789 - DNA, 2211 bp, Artificial Sequence
  source: /note="Description of Artificial Sequence: Synthetic polynucleotide"
atggctgctgacggttatcttccagattggctcgaggacaacctttctgaaggcattcgtgagtggtgggctctgaaacctggagtccctcaacccaaagcgaaccaacaacaccaggacaaccgtcggggtcttgtgcttccgggttacaaatacctcggacccggtaacggactcgacaaaggagagccggtcaacgaggcggacgcggcagccctcgaacacgacaaagcttacgaccagcagctcaaggccggtgacaacccgtacctcaagtacaaccacgccgacgccgagtttcaggagcgtcttcaagaagatacgtcttttgggggcaaccttggcagagcagtcttccaggccaaaaagaggatccttgagcctcttggtctggttgagggagcagctaaaacggctcctggaaagaagaggcctgtagatcagtctcctcaggaaccggactcatcatctggtgttggcaaatcgggcaaacagcctgccagaaaaagactaaatttcggtcagactggcgactcagagtcagtcccagaccctcaacctctcggagaaccaccagcagcccccacaagtttgggatctaatacaatggcttcaggcggtggcgcaccaatggcagacaataacgagggtgccgatggagtgggtaattcctcaggaaattggcattgcgattcccaatggctgggcgacagagtcatcaccaccagcaccagaacctgggccctgcccacttacaacagccatctctacaagcaaatctccagccaatcaggagcttcaaacgacaaccactactttggctacagcaccccttggggtattttgactttaacagattccactgccacttctcaccacgtgactggcagcgactcattaacaacaactggggattccggcccaagaaactcagcttcaagctcttcaacatccaagttaaagaggtcacgcagaacgatggcacgacgactattgccaataaccttaccagcacggttcaagtgtttacggactcggagtatcagctcccgtacgtgctcgggtcggcgcaccaaggctgtctcccgccgtttccagcggacgccttcatggtccctcagtatggatacctcaccctgaacaacggaagtcaagcggtgggacgctcatccttttactgcctggagtacttcccttcgcagatgctaaggactggaaataacttccaattcagctataccctcgaggatgtaccttttcacagcagctacgctcacagccagagtttggatcgcttgatgaatcctcttattgatcagtatctgtactacctgaacagaacgcaaggaacaacctctggaacaaccaaccaatcacggctgctttttagccaggctgggcctcagtctatgtctttgcaggccagaaattggctacctgggccctgctaccggcaacagagactttcaaagactgctaacgacaacaacaacagtaactttccttggacagcggccagcaaatatcatctcaatggccgcgactcgctggtgaatccaggaccagctatggccagtcacaaaggacgatgaagaaaaatttttccctatgcacggcaatctaatatttggcaaagaagggacaacggcaagtaacgcagaattagatagtgtaatgattacggatgaagaagagattcgtaccaccaatcctgtggcaacagagcagtatggaactgtggcaaataacttgcagagctcaaatacagctcccacgactagaactgtcaatgatcagggggccttacctggcatggtgtggcaagatcgtgacgtgtaccttcaaggacctatctgggcaaagattcctcacacggatggacactttcatccttctcctctgatgggaggctttggactgaaacatccgcctcctcaaatcatgatcaaaaatactccggtaccggcaaatcctccgacgactttcagcccggccaagtttgcttcatttatcactcagtactccactggacaggtcagcgtggaaattgagtgggagctacagaaagaaaacagcaaacgttggaatccagagattcagtacacttccaactacaacaagtctgttaatgtggactttactgtagacactaatggtgtttatagtgaacctcgccctattggaacccggtatctcacacgaaacttgtaa

SEQ ID NO: 790 - DNA, 2205 bp, Artificial Sequence
  source: /note="Description of Artificial Sequence: Synthetic polynucleotide"
atgactgacggttaccttccagattggctagaggacaacctctctgagggcgttcgagagtggtgggcgctgcaacctggagcccctaaacccaaggcaaatcaacaacatcaggacaacgctcggggtcttgtgcttccgggttacaaatacctcggacccggcaacggactcgacaagggggaacccgtcaacgcagcggacgcggcagccctcgagcacgacaaggcctacgaccagcagctcaaggccggtgacaacccctacctcaagtacaaccacgccgacgcggagttccagcagcggcttcagggcgacacatcgtttgggggcaacctcggcagagcagtcttccaggccaaaaagagggttcttgaacctcttggtctggttgagcaagcgggtgagacggctcctggaaagaagagaccgttgattgaatccccccagcagcccgactcctccacgggtatcggcaaaaaaggcaagcagccggctaaaaagaagctcgttttcgaagacgaaactggagcaggcgacggaccccctgagggatcaacttccggagccatgtctgatgacagtgagatgcgtgcagcaactggcggagctgcagtcgagggcggacaaggtgccgatggagtgggtaatgcctcgggtgattggcattgcgattccacctggtctgagggccacgtcacgaccaccagcaccagaacctgggtcttgcccacctacaacaaccacctctacaagcgactcggagagagcctgcagtccaacacctacaacggattctccaccccctggggatactttgacttcaaccgcttccactgccacttctcaccacgtgactggcagcgactcatcaacaacaactggggcatgcgacccaaagccatgcgggtcaaaatcttcaacatccaggtcaaggaggtcacgacgtcgaacggcgagacaacggtggctaataaccttaccagcacggttcagatctttgcggactcgtcgtacgaactgccgtacgtgatggatgcgggtcaagagggcagcctgcctccttttcccaacgacgtctttatggtgccccagtacggctactgtggactggtgaccggcaacacttcgcagcaacagactgacagaaatgccttctactgcctggagtactttccttcgcagatgctgcggactggcaacaactttgaaattacgtacagttttgagaaggtgcctttccactcgatgtacgcgcacagccagagcctggaccggctgatgaaccctctcatcgaccagtacctgtggggactgcaatcgaccaccaccggaaccaccctgaatgccgggactgccaccaccaactttaccaagctgcggcctaccaacctttccaactttaaaaagaactggctgcccgggccttcaatcaagcagcagggcttctcaaagactgccaatcaaaactacaagatccctgccaccgggtcagacagtctcatcaaatacgagacgcacagcactctggacggaagatggagtgccctgacccccggacctccaatggccacggctggacctgcggacagcaagttcagcaacagccagctcatctttgcggggcctaaacagaacggcaacacggccaccgtacccgggactctgatcttcacctctgaggaggagctggcagccaccaacgctaccgatacggacatgtggggcaacctacctggcggtgaccagagcaacagcaacctgccgaccgtggacagactgacagccttgggagccgtgcctggaatggtctggcaaaacagagacatttactaccagggtcccatttgggccaagattcctcataccgatggacactttcacccctcaccgctgattggtgggtttgggctgaaacacccgcctcctcaaatttttatcaagaacaccccggtacctgcgaatcctgcgacgaccttcagctctactccggtaaactccttcattactcagtacagcactggccaggtgtcggtgcagattgactgggagatccagaaggagcggtccaaacgctggaaccccgaggtccagtttacctccaactacggacagcaaaactctctgttgtgggctcccgatgcggctgggaaatacactgagcctagggctatcggtacccgctacctcacccaccacctgtaa

SEQ ID NO: 791 - DNA, 2205 bp, Artificial Sequence
  source: /note="Description of Artificial Sequence: Synthetic polynucleotide"
atgactgacggttaccttccagattggctagaggacaacctctctgaaggcgttcgagagtggtgggcgctgcaacctggagcccctaaacccaaggcaaatcaacaacatcaggacaacgctcggggtcttgtgcttccgggttacaaatacctcggacccggcaacggactcgacaagggggaacccgtcaacgcagcggacgcggcagccctcgagcacgacaaggcctacgaccagcagctcaaggccggtgacaacccctacctcaagtacaaccacgccgacgcggagttccagcagcggcttcagggcgacacatcgtttgggggcaacctcggcagagcagtcttccaggccaaaaagagggttcttgaacctcttggtctggttgagcaagcgggtgagacggctcctggaaagaagagaccgttgattgaatccccccagcagcccgactcctccacgggtatcggcaaaaaaggcaagcagccggctaaaaagaagctcgttttcgaagacgaaactggagcaggcgacggaccccctgagggatcaacttccggagccatgtctgatgacagtgagatgcgtgcagcagctggcggagctgcagtcgagggcggacaaggtgccgatggagtgggtaatgcctcgggtgattggcattgcgattccacctggtctgagggccacgtcacgaccaccagcaccagaacctgggtcttgcccacctacaacaaccacctctacaagcgactcggagagagcctgcagtccaacacctacaacggattctccaccccctggggatactttgacttcaaccgcttccactgccacttcttaccacgtgactggcagcgactcatcaacaacaactggggcgtgcgacccaaagccatgcgggtcaaaatcttcaacatccaggtcaaggaggtcacgacgtcgaacggcgagacaacggtggctaataaccttaccagcacggttcagatctttgcggactcgtcgtacgaactgccgtacgtgatggatgcgggtcaagagggcagcctgcctccttttcccaacgacgtctttatggtgccccagtacggctactgtggactggtgaccggcgacacttcgcagcaacagactgacagaaatgccttctactgcctggagtactttccttcgcagatgctgcggactggcaacaactttgaaattacgtacagttttgagaaggtgcctttccactcgatgtacgcgcacagccagagcctggaccggctgatgaaccctctcatcgaccagtacctgtggggactgcaatcgaccaccaccggaaccaccctgaatgccgggactgccaccaccaactttaccaagctgcggcctaccaacttttccaactttaaaaagaactggctgcccgggccttcaatcaagcagcagggcttctcaaagactgccaatcaaaactacaagatccctgccaccgggtcagacagtctcatcaaatacgagacgcacagcactctggacggaagatggagtgccctgacccccggacctccaatggccacggctggacctgcggacagcaagttcagcaacagccagctcatctttgcggggcctaaacagaacggcaacacggccaccgtacccgggactctgatcttcacctctgaggaggagctggcagccaccaacgccaccgatacggacatgtggggcaacctacctggcggtgaccagagcaacagcaacctgccgaccgtggacagactgacagccttgggagccgtgcctggaatggtctggcaaaacagagacatttactaccagggtcccatttgggccaagattcctcataccgatggacactttcacccctcaccgctgattggtgggtttgggctgaaacacccgcctcctcaaatttttatcaagaacaccccggtacctgcgaatcctgcgacgaccttcagctctactccggtaaactccttcattactcagtacagcactggccaggtgtcggtgcagattgactgggagatccagaaggagcggtccaaacgctggaaccccgaggtccagtttacctccaactacggacagcaaaactctctgttgtgggctcccgatgcggctgggaaatacactgagcctagggctatcggtacccgctacctcacccaccacctgtaa

SEQ ID NO: 792 - DNA, 2205 bp, Artificial Sequence
  source: /note="Description of Artificial Sequence: Synthetic polynucleotide"
atgactgacggttaccttccagattggctagaggacaacctctctgaaggcgttcgagagtggtgggcgctgcaacctggagcccctaaacccaaggcaaatcaacaacatcaggacaacgctcggggtcttgtgcttccgggttacaaatacctcggacccggcaacggactcgacgagggggaacccgtcaacgcagcggacgcggcagccctcgagcacgacaaggcctacgaccagcagctcaaggccggtgacaacccctacctcaagtacaaccacgccgacgcggagttccagcagcggcttcagggcgacacatcgtttgggggcaacctcggcagagcagtcttccaggccaaaaagagggttcttgaacctcttggtctggttgagcaagcgggtgagacggctcctggaaagaagagaccgttgattgaatccccccagcagcccgactcctccacgggtatcggcaaaaaaggcaagcagccggctaaaaagaagctcgttttcgaagacgaaactggagcaggcgacggaccccctgagggatcaacttccggagccatgtctgatgacagtgagatgcgtgcagcagctggcggagctgcagtcgagggcggacaaggtgccgatggagtgggtaatgcctcgggtgattggcattgcgattccacctggtctgagggccacgtcacgaccaccagcaccagaacctgggtcttgcccacctacaacaaccacctctacaagcgactcggagagagcctgcagtccaacacctacaacggattctccaccccctggggatactttgacttcaaccgcttccactgccacttctcaccacgtgactggcagcgactcatcaacaacaactggggcatgcgacccaaagccatgcgggtcaaaatcttcaacatccaggtcaaggaggtcacgacgtcgaacggcgagacaacggtggctaataaccttaccagcacggttcagatctttgcggactcgtcgtacgaactgccgtacgtgatggatgcgggtcaagagggcagcctgcctccttttcccaacgacgtctttatggtgccccagtacggctactgtggactggtgaccggcaacacttcgcagcaacagactgacagaaatgccttctactgcctggagtactttccttcgcagatgctgcggactggcaacaactttgaaattacgtacagttttgagaaggtgcctttccactcgatgtacgcgcacagccagagcctggaccggctgatgaaccctctcatcgaccagtacctgtggggactgcaatcgaccaccaccggaaccaccctgaatgccgggactgccaccaccaactttaccaagctgcggcctaccaacttttccaactttaaaaagaactggctgcccgggccttcaatcaagcagcagggcttctcaaagactgccaatcaaaactacaagatccctgccaccgggtcagacagtctcatcaaatacgagacgcacagcactctggacggaagatggagtgccctgacccccggacctccaatggccacggctggacctgcggacagcaagttcagcaacagccagctcatctttgcggggcctaaacagaacggcaacacggccaccgtacccgggactctgatcttcacctctgaggaggagctggcagccaccaacgctaccgatacggacatgtggggcaacctacctggcggtgaccagagcaacagcaacctgccgaccgtggacagactgacagccttgggagccgtgcctggaatggtctggcaaaacagagacatttactaccagggtcccatttgggccaagattcctcataccgatggacactttcacccctcaccgctgattggtgggtttgggctgaaacacccgcctcctcaaatttttatcaagaacaccccggtacctgcgaatcctgcgacgaccttcagctctactccggtaaactccttcattactcagtacagcactggccaggtgtcggtgcagattgactgggagatccagaaggagcggtccaaacgctggaaccccgaggtccagtttacctccaactacggacagcaaaactctctgttgtgggctcccgatgcggctgggaaatacactgagcctagggctatcggtacccgctacctcacccaccacctgtaa

SEQ ID NO: 793 - DNA, 2205 bp, Artificial Sequence
  source: /note="Description of Artificial Sequence: Synthetic polynucleotide"
atgactgacggttaccttccagattggctagaggacaacctctctgaaggcgttcgagagtggtgggcgctgcaacctggagcccctaaacccaaggcaaatcaacaacatcaggacaacgctcggggtcttgtgcttccgggttacaaatacctcggacccggcaacggactcgacaagggggaacccgtcaacgcagcggacgcggcagccctcgagcacgacaaggcctacgaccagcagctcaaggccggtgacaacccctacctcaagtacaaccacgccgacgcggagttccagcagcggcttcagggcgacacatcgtttgggggcaacctcggcagagcagtcttccaggccaaaaagagggttcttgaacctcttggtctggttgagcaagcgggtgagacggctcctggaaagaagagaccgttgattgaatccccccagcagcccgactcctccacgggtatcggcaaaaaaggcaagcagccggctaaaaagaagctcgttttcgaagacggaactggagcaggcgacggaccccctgagggatcaacttccggagccatgtctgatgacagtgagatgcgtgcagcagctggcggagctgcagtcgagggcggacaaggtgccgatggagtgggtaatgcctcgggtgattggcattgcgattccacctggtctgagggccacgtcacgaccaccagcaccagaacctgggtcttgcccacctacaacaaccacctctacaagcgactcggagagagcctgcagtccaacacctacaacggattccccaccccctggggatactttgacttcaaccgcttccactgccacttctcaccacgtgactggcagcgactcatcaacaacaactggggcatgcgacccaaagccatgcgggtcaaaatcttcaacatccaggtcaaggaggtcacgacgtcgaacggcgagacaacggcggctaataaccttaccagcacggttcagatctttgcggactcgtcgtacgaactgccgtacgtgatggatgcgggtcaagagggcagcctgcctccttttcccaacgacgtctttatggtgccccagtacggctactgtggactggtgaccggcaacacttcgcagcaacagactgacagaaatgccttctactgcctggagtactttccttcgcagatgctgcggactggcaacaactttgaaattacgtacagttttgagaaggtgcctttccactcgatgtacgcgcacagccagagcctggaccggctgatgaaccctctcatcgaccagtacctgtggggactgcaatcgaccaccaccggaaccaccctgaatgccgggactgccaccaccaactttaccaagctgcggcctaccaacttttccaactttaaaaagaactggctgcccgggccttcaatcaagcagcagggcttctcaaagactgccaatcaaaactacaagatccctgccaccgggtcagacagtctcatcaaatacgagacgcacagcactctggacggaagatggagtgccctgacccccggacctccaatggccacggctggacctgcggacagcaagttcagcaacagccagctcatctttgcggggcctaaacagaacggcaacacggccaccgtacccgggactctgatcttcacctctgaggaggagctggcagccaccaacgccaccgatacggacatgtggggcaacctacctggcggtgaccagagcaacagcaacctgccgaccgtggacagactgacagccttgggagccgtgcctggaatggtctggcaaaacagagacatttactaccagggtcccatttgggccaagattcctcataccgatggacactttcacccctcaccgctgattggtgggtttgggctgaaacacccgcctcctcaaatttttatcaagaacaccccggtacctgcgaatcctgcgacgaccttcagctctactccggtaaactccttcattactcagtacagcactggccaggtgtcggtgcagattgactgggagatccagaaggagcggtccaaacgctggaaccccgaggtccagtttacctccaactacggacagcaaaactctctgttgtgggctcccgatgcggctgggaaatacactgagcctagggctatcggtacccgctacctcacccaccacctgtaa

SEQ ID NO: 794 - DNA, 2205 bp, Artificial Sequence
  source: /note="Description of Artificial Sequence: Synthetic polynucleotide"
atgactgacggttaccttccagattggctagaggacaacctctctgaaggcgttcgagagtggtgggcgctgcaacctggagcccctaaacccaaggcaaatcaacaacatcaggacaacgctcggggtcttgtgcttccgggttacaaatacctcggacccggcaacggactcgacaagggggaacccgtcaacgcagcggacgcggcagccctcgagcacgacaaggcctacgaccagcagctcaaggccggtgacaacccctacctcaagtacaaccacgccgacgcggagttccagcagcggcttcagggcgacacatcgtttgggggcaacctcggcagagcagtcttccaggccaaaaagagggttcttgaacctcttggtctggttgagcaagcgggtgagacggctcctggaaagaagagaccgttgattgaatccccccagcagcccgactcctccacgggtatcggcaaaaaaggcaagcagccggctaaaaagaagctcgttttcgaagacgaaactggagcaggcgacggaccccctgagggatcaacttccggagccatgtctgatgacagtgagatgcgtgcagcagctggcggagctgcagtcgagggcggacaaggtgccgatggagtgggtaatgcctcgggtgattggcattgcgattccacctggtctgagggccacgtcacgaccaccagcaccagaacctgggtcttgcccacctacaacaaccacctctacaagcgactcggagagagcctgcagtccaacacctacaacggattctccaccccctggggatactttgacttcaaccgcttccactgccacttctcaccacgtgactggcagcgactcatcaacaacaactggggcatgcgacccaaagccatgcgggtcaaaatcttcaacatccaggtcaaggaggtcacgacgtcgaacggcgagacaacggtggctaataaccttaccagcacggttcagatctttgcggactcgtcgtacgaactgccgtacgtgatggatgcgggtcaagagggcagcctgcctccttttcccaacgacgtctttatggtgccccagtacggctaccgtggactggtgaccggcaacacttcgcagcaacagactgacagaaatgccttctactgcctggagtactttccttcgcagatgctgcggactggcaacaactttgaaattacgtacagttttgagaaggtgcctttccactcgatgtacgcgcacagccagagcctggaccggctgatgaaccctctcatcgaccagtacctgtggggactgcaatcgaccaccaccggaaccaccctgaatgccgggactgccaccaccaactttaccaagctgcggcctaccaacttttccaactttaaaaagaactggctgcccgggccttcaatcaagcagcagggcttctcaaagactgccaatcaaaactacaagatccctgccaccgggtcagacagtctcatcaaatacgagacgcacagcactctggacggaagatggagtgccctgacccccggacctccaatggccacggctggacctgcggacagcaagttcagcaacagccagctcatctttgcggggcctaaacagaacggcaacacggccaccgtacccgggactctgatcttcacctctgaggaggagctggcagccaccaacgccaccgatacggacatgtggggcaacctacctggcggtgaccagagcaacagcaacctgccgaccgtggacagactgacagccttgggagccgtgcctggaatggtctggcaaaacagagacatttactaccagggtcccatttgggccaagattcctcataccgatggacactttcacccctcaccgctgattggtgggtttgggctgaaacacccgcctcctcaaatttttatcaagaacaccccggtacctgcgaatcctgcgacgaccttcagctctactccggtaaactccttcattactcagtacagcactggccaggtgtcggtgcagattgactgggagatccagaaggagcggtccaaacgctggaaccccgaggtccagtttacctccaactacggacagcaaaactctctgttgtgggctcccgatgcggctgggaaatacactgagcctagggctatcggtacccgctacctcacccaccacctgtaa

SEQ ID NO: 795 - DNA, 2205 bp, Artificial Sequence
  source: /note="Description of Artificial Sequence: Synthetic polynucleotide"
atgactgacggttaccttccagattggctagaggacaacctctctgaaggcgttcgagagtggtgggcgctgcaacctggagcccctaaacccaaggcaaatcaacaacatcaggacaacgctcggggtcttgtgcttcagggttacaaatacctcggacccggcaacggactcgacaagggggaacccgtcaacgcagcggacgcggcagccctcgagcacgacaaggcctacgaccagcagctcaaggccggtgacaacccctacctcaagtacaaccacgccgacgcggagttccagcagcggcttcagggcgacacatcgtttgggggcaacctcggcagagcagtcttccaggccaaaaagagggttcttgaaccccttggtctggttgagcaagcgggtgagacggctcctggaaagaagagaccgttgattgaatccccccagcagcccgactcctccacgggtatcggcaaaaaaggcaagcagccggctaaaaagaagctcgttttcgaagacgaaactggagcaggcgacggaccccctgagggatcaacttccggagccatgtctgatgacagtgagatgcgtgcagcagctggcggagctgcagtcgagggcggacaaggtgccgatggagtgggtaatgcctcgggtgattggcattgcgattccacccggtctgagggccacgtcacgaccaccagcaccagaacctgggtcttgcccacctacaacaaccacctctacaagcgactcggagagagcctgcagtccaacacctacaacggattctccaccccctggggatactttgacttcaaccgcttccactgccacttctcaccacgtgactggcagcgactcatcaacaataactggggcatgcgacccaaagccatgcgggtcaaaatcttcaacatccaggtcaaggaggtcacgacgtcgaacggcgagacaacggtggctaataaccttaccagcacggttcagatctttgcggactcgtcgtacgaactgccgtacgtgatggatgcgggtcaagagggcagcctgcctccttttcccaacgacgtctttatggtgccccagtacggctactgtggactggtgaccggcaacacttcgcagcaacagactgacagaaatgccttctactgcctggagtactttccttcgcagatgctgcggactggcaacaactttgaaattacgtacagttttgagaaggtgcctttccactcgatgtacgcgcacagccagagcctggaccggctgatgaaccctctcatcgaccagtacctgtggggactgcaatcgaccaccaccggaaccaccctgaatgccgggactgccaccaccaactttaccaagctgcggcctaccaacttttccaactttaaaaagaactggctgcccgggccttcaatcaagcagcagggcttctcaaagactgccaatcaaaactacaagatccctgccaccgggtcagacagtctcatcaaatacgagacgcacagcactctggacggaagatggagtgcccggacccccggacctccaatggccacggctggacctgcggacagcaagttcagcaacagccagctcatctttgcggggcctaaacagaacggcaacacggccaccgtacccgggactctgatcttcacctctgaggaggagctggcagccaccaacgccaccgatacggacatgtggggcaacctacctggcggtgaccagagcaacagcaacctgccgaccgtggacagactgacagccttgggagccgtgcctggaatggtctggcaaaacagagacatttactaccagggtcccatttgggccaagattcctcataccgatggacactttcacccctcaccgctgattggtgggtttgggctgaaacacccgcctcctcaaatttttatcaagaacaccccggtacctgcgaatcctgcgacgaccttcagctctactccggtaaactccttcattactcagtacagcactggccaggtgtcggtgcagattgactgggagatccagaaggagcggtccaaacgctggaaccccgaggtccagtttacctccaactacggacagcaaaactctctgttgtgggctcccgatgcggctgggaaatacactgagcctagggctatcggtacccgctacctcacccaccacctgtaa

SEQ ID NO: 796 - DNA, 2175 bp, Artificial Sequence
  source: /note="Description of Artificial Sequence: Synthetic polynucleotide"
atgtcttttgttgatcaccctccagattggttggaagaagttggtgaaggtcttcgcgagtttttgggccttgaagcgggcccaccgaaaccaaaacccaatcagcagcatcaagatcaagcccgtggtcttgtgctgcctggttataactatctcggacccggaaacggtctcgatcgaggagagcctgtcaacagggcagacgaggtcgcgcgagagcacgacatctcgtacaacgagcagcttgaggcgggagacaacccctacctcaagtacaaccacgcggacgccgagtttcaggagaggctcgccgacgacacatccttcgggggaaacctcggaaaggcagtctttcaggccaagaaaagggttctcgaaccttttggcctggttgaagagggtgctaagacggcccctaccggaaagcggatagacgaccactttccaaaaagaaagaaggcccggaccgaagaggactccaagccttccacctcgtcagacgccgaagctggacccagcggatcccagcagctgcaaatcccagcccaaccagcctcaagtttgggagctgatacaatgtctgcgggaggtggcggcccattgggcgacaataaccaaggtgccgatggagtgggcaatgcctcgggagattggcattgcgattccacgtggatgggggacagagtcgtcaccaagtccacccgaacctgggtgctgcccagctacaacaaccaccagtaccgagagatcaaaagcggctccgtcgacggaagcaacgccaacgcctactttggatacagcaccccctgggggtactttgactttaaccgcttccacagccactggagcccccgagactggcaaagactcatcaacaactactggggcttcagaccccggtccctcagagtcaaaatcttcaacattcaagtcaaagaggtcacggtgcaggactccaccaccaccatcgccaacaacctcacctccaccgtccaagtgtttacggacgacgactaccagctgccctacgtcgtcggcaacgggaccgagggatgcctgccggccttccctccgcaggtctttacgctgccgcagtacggttacgcgacgctgaaccgcgacaacacagaaaatcccaccgagaggagcagcttcttctgcctagagtactttcccagcaagatgctgagaacgggcaacaactttgagtttacctacaactttgaggaggtgcccttccactccagcttcgctcccagtcagaacctcttcaagctggccaacccgctggtggaccagtacttgtaccgcttcgtgagcacaaataacactggcggagtccagttcaacaagaacctggccgggagatacgccaacacctacaaaaactggttcccggggcccatgggccgaacccagggctggaacctgggctccggggtcaaccgcgccagtgtcagcgccttcgccacgaccaataggatggagctcgagggcgcgagttaccaggtgcccccgcagccgaacggcatgaccaacaacctccagggcagcaacacctatgccctggagaacactatgatcttcaacagccagccggcgaacccgggcaccaccgccacgtacctcgagggcaacatgctcatcaccagcgagagcgagacgcagccggtgaaccgcgtggcgtacaacgtcggcgggcagatggccaccaacaaccagagctccaccactgcccccgcgaccggcacgtacaacctccaggaaatcgtgcccggcagcgtgtggatggagagggacgtgtacctccaaggacccatctgggccaagatcccagagacggaggcgcactttcacccctctccggccatgggcggattcggactcaaacacccaccgcccatgatgctcatcaagaacacgcctgtgcccggaaatatcaccagcttctcggacgtgcccgtcagcagcttcatcacccagtacagcaccgggcaggtcaccgtggagatggagtgggagctcaagaaggaaaactccaagaggtggaacccagagatccagtacacaaacaactacaacgacccccagtttgtggactttgccccggacagcaccggggaatacagaaccaccagacctatcggaacccgataccttacccgacccctttaa

SEQ ID NO: 797 - DNA, 2175 bp, Artificial Sequence
  source: /note="Description of Artificial Sequence: Synthetic polynucleotide"
atgtcttttgttgatcaccctccagattggttggaagaagttggtgaaggtcttcgcgagtttttgggccttgaagcgggcccaccgaaaccaaaacccaatcagcagcatcaagatcaagcccgtggtcttgtgctgcctggttataactatctcggacccggaaacggtctcgatcgaggagagcctgtcaacagggcagacgaggtcgcgcgagagcacgacatctcgtacaacgagcagcttgaggcgggagacaacccctacctcaagtacaaccacgcggacgccgagtttcaggagaagctcgccgacgacacatcctccgggggaaacctcggaaaggcagtctttcaggccaagaaaagggttctcgaaccttttggcctggttgaagagggtgctaagacggcccctaccggaaagcggatagacgaccactttccaaaaagaaagaaggcccggaccgaagaggactccaagccttccacctcgtcagacgccgaagctggacccagcggatcccagcagctgcaaatcccagcccaaccagcctcaagtttgggagctgatacaatgtctgcgggaggtggcggcccattgggcgacaataaccaaggtgccgatggagtgggcaatgcctcgggagattggcattgcgattccacgtggatgggggacagagtcgtcaccaagtccacccgaacctgggtgctgcccagctacaacaaccaccagtaccgagagatcaaaagcggctccgtcgacggaagcaacgccaacgcctactttggatacagcaccccctgggggtactttgactttaaccgcttccacagccactggagcccccgagactggcaaagactcatcaacaactactggggcttcagaccccggtccctcagagtcaaaatcttcaacattcaagtcaaagaggtcacggtgcaggactccaccaccaccatcgccaacaacctcacctccaccgtccaagtgtttacggacgacgactaccagctgccctacgtcgtcggcaacgggaccgagggatgcctgccggccttccctccgcaggtctttacgctgccgcagtacggttacgcgacgctgaaccgcgacaacacagaaaatcccaccgagaggagcagcttcttctgcctagagtactttcccagcaagatgctgagaacgggcaacaactttgagtttacctacaactttgaggaggtgcccttccactccagcttcgctcccagtcagaacctcttcaagctggccaacccgctagtggaccagtacttgtaccgcttcgtgagcacaaataacactggcggagtccagttcaacaagaacctggccgggagatacgccaacacctacaaaaactggttcccggggcccatgggccgaacccagggctggaacctgggctccggggtcaaccgcgccagtgtcagcgccttcgccacgaccaataggatggagctcgagggcgcgagttaccaggtgcccccgcagccgaacggcatgaccaacaacctccagggcagcaacacctatgccctggagaacactatgatcttcaacagccagccggcgaacccgggcaccaccgccacgtacctcgagggcaacatgctcatcaccagcgagagcgagacgcagccggtgaaccgcgtggcgtacaacgtcggcgggcagatggccaccaacaaccagagctccaccactgcccccgcgaccggcacgtacaacctccaggaaatcgtgcccggcagcgtgtggatggagagggacgtgtacctccaaggacccatctgggccaagatcccagagacgggggcgcactttcacccctctccggccatgggcggattcggactcaaacacccaccgcccatgatgctcatcaagaacacgcctgtgcccggaaatatcaccagcttctcggacgtgcccgtcagcagcttcatcacccagtacagcaccgggcaggtcaccgtggagatggagtgggagctcaagaaggaaaactccaagaggtggaacccagagatccagtacacaaacaactacaacgacccccagtttgtggactttgccccggacagcaccggggaatacagaaccaccagacctatcggaacccgataccttacccgacccctttaa

SEQ ID NO: 798 - DNA, 2175 bp, Artificial Sequence
  source: /note="Description of Artificial Sequence: Synthetic polynucleotide"
atgtcttttgttgatcaccctccagattggttggaagaagttggtgaaggtcttcgcgagtttttgggccttgaagcgggcccaccgaaaccaaaacccaatcagcagcatcaagatcaagcccgtggtcttgtgctgcctggttataactatctcggacccggaaacggtctcgatcgaggagagcctgtcaacagggcagacgaggtcgcgcgagagcacgacatctcgtacaacgagcagcttgaggcgggagacaacccctacctcaagtacaaccacgcggacgccgagtttcaggagaagctcgccgacgacacatccttcgggggaaacctcggaaaggcagtctttcaggccaagaaaagggttctcgaaccttttggcctggttgaagagggtgctaagacggcccctaccggaaagcggatagacgaccactttccaaaaagaaagaaggcccggaccgaagaggactccaagccttccacctcgtcagacgccgaagctggacccagcggatcccagcagctgcaaatcccagcccaaccagcctcaagtttgggagctgatacaatgtctgcgggaggtggcggcccattgggcgacaataaccaaggtgccgatggagtgggcaatgcctcgggagattggcattgcgattccacgtggatgggggacagagtcgtcaccaagtccacccgaacctgggtgctgcccagctacaacaaccaccagtaccgagagatcaaaagcggctccgtcgacggaagcaacgccaacgcctactttggatacagcaccccctgggggtactttgactttaaccgcttccacagccactggagcccccgagactggcaaagactcatcaacaactactggggcttcagaccccggtccctcagagtcaaaatcttcaacattcaagtcaaagaggtcacggtgcaggactccaccaccaccatcgccaacaacctcacctccaccgtccaagtgtttacggacgacgactaccagctgccctacgtcgtcggcaacgggaccgagggatgcctgccggccttccctccgcaggtctttacgctgccgcagtacggttacgcgacactgaaccgcgacaacacagaaaatcccaccgagaggagcagcttcttctgcctagagtactttcccagcaagatgctgagaacgggcaacaactttgagtttacctacaactttgaggaggtgcccttccactccagcttcgctcccagtcagaacctcttcaagctggccaacccgctggtggaccagtacttgtaccgcttcgtgagcacaaataacactggcggagtccagttcaacaagaacctggccgggagatacgccaacacctacaaaaactggttcccggggcccatgggccgaacccagggctggaacctgggctccggggtcaaccgcgccagtgtcagcgccttcgccacgaccaataggatggagctcgagggcgcgagttaccaggtgcccccgcagccgaacggcatgaccaacaacctccagggcagcaacacctatgccctggagaacactatgatcttcaacagccagccggcgaacccgggcaccaccgccacgtacctcgagggcaacatgctcatcaccagcgagagcgagacgcagccggtgaaccgcgtggcgtacaacgtcggcgggcagatggccaccaacaaccagagctccaccactgcccccgcgaccggcacgtacaacctccaggaaatcgtgcccggcagcgtgtggatggagagggacgtgtacctccaaggacccatctgggccaagatcccagagacgggggcgcactttcacccctctccggccatgggcggattcggactcaaacacccaccgcccatgatgctcatcaagagcacgcctgtgcccggaaatatcaccagcttctcggacgtgcccgtcagcagcttcatcacccagtacagcaccgggcaggtcaccgtggagatggagtgggagctcaagaaggaaaactccaagaggtggaacccagagatccagtacacaaacaactacaacgacccccagtttgtggactttgccccggacagcaccggggaatacagaaccaccagacctatcggaacccgataccttacccgacccctttaa

SEQ ID NO: 799 - DNA, 2175 bp, Artificial Sequence
  source: /note="Description of Artificial Sequence: Synthetic polynucleotide"
atgtcttttgttgatcaccctccagattggttggaagaagttggtgaaggtcttcgcgagtttttgggccctgaagcgggcccaccgaaaccaaaacccaatcagcagcatcaagatcaagcccgtggtcttgtgctgcctggttataactatctcggacccggaaacggtctcgatcgaggagagcctgtcaacagggcagacgaggtcgcgcgagagcacgacatctcgtacaacgagcagcttgaggcgggagacaacccctacctcaagtacaaccacgcggacgccgagtttcaggagaagctcgccgacgacacatccttcgggggaaacctcggaaaggcagtctttcaggccaagaaaagggttctcgaaccttttggcctggttgaagagggtgctaagacggcccctaccggaaagcggatagacgaccactttccaaaaagaaagaaggtccggaccgaagaggactccaagccttccacctcgtcagacgccgaagctggacccagcggatcccagcagctgcaaatcccagcccaaccagcctcaagtttgggagctgatacaatgtctgcgggaggtggcggcccattgggcgacaataaccaaggtgccgatggagtgggcaatgcctcgggagattggcattgcgattccacgtggatgggggacagagtcgtcaccaagtccacccgaacctgggtgccgcccagctacaacaaccaccagtaccgagagatcaaaagcggctccgtcgacggaagcaacgccaacgcctactttggatacagcaccccctgggggtactttgactttaaccgcttccacagccactggagcccccgagactggcaaagactcatcaacaactactggggcttcagaccccggtccctcagagtcaaaatcttcaacattcaagtcaaagaggtcacggtgcaggactccaccaccaccatcgccaacaacctcacctccaccgtccaagtgtttacggacgacgactaccagctgccctacgtcgtcggcaacgggaccgagggatgcctgccggccttccctccgcaggtctttacgctgccgcagtacggttacgcgacgctgaaccgcgacaacacagaaaatcccaccgagaggagcagcttcttctgcctagagtactttcccagcaagatgctgagaacgggcaacaactttgagtttacctacaactttgaggaggtgcccttccactccagcttcgctcccagtcagaacctcttcaagctggccaacccgctggtggaccagtacttgtaccgcttcgtgagcacaaataacactggcggagtccagttcaacaagaacctggccgggagatacgccaacacctacaaaaactggttcccggggcccatgggccgaacccagggctggaacctgggctccggggtcaaccgcgccagtgtcagcgccttcgccacgaccaataggatggagctcgagggcgcgagttaccaggtgcccccgcagccgaacggcatgaccaacaacctccagggcagcaacacctatgccctggagaacactatgatcttcaacagccagccggcgaacccgggcaccaccgccacgtacctcgagggcaacatgctcatcaccagcgagagcgagacgcagccggtgaaccgcgtggcgtgcaacgtcggcgggcagatggccaccaacaaccagagctccaccactgcccccgcgaccggcacgtacaacctccaggaaatcgtgcccggcagcgtgtggatggagagggacgtgtacctccaaggacccatctgggccaagatcccagagacgggggcgcactttcacccctctccggccatgggcggattcggactcaaacacccaccgcccatgatgctcatcaagaacacgcctgtgcccggaaatatcaccagcttctcggacgtgcccgtcagcagcttcatcacccagtacagcaccgggcaggtcaccgtggagatggagtgggagctcaagaaggaaaactccaagaggtggaacccagagatccagtacacaaacaactacaacgacccccagtttgtggactttgccccggacagcaccggggaatacagaaccaccagacctattggaacccgataccttacccgacccctttaa

SEQ ID NO: 800 - DNA, 2175 bp, Artificial Sequence
  source: /note="Description of Artificial Sequence: Synthetic polynucleotide"
atgtcttttgttgatcaccctccagattggttggaagaagttggtgaaggtcttcgcgagtttttgggccttgaagcgggcccaccgaaaccaaaacccaatcagcagcatcaagatcaagcccgtggtcttgtgctgcctggttataactatctcggacccggaaacggtctcgatcgaggagagcctgtcaacagggcagacgaggtcgcgcgagagcacgacatctcgtacaacgagcagcttgaggcgggagacaacccctacctcaagtacaaccacgcggacgccgagtttcaggagaagctcgccgacgacacatccttcgggggaaacctcggaaaggcagtctttcaggccaagaaaagggttctcgaaccttttggcctggttgaagagggtgctaagacggcccctaccggaaagcggatagacgaccactttccaaaaagaaagaaggcccggaccgaagaggactccaagccttccacctcgtcagacgccgaagctggacccagcggatcccagcagctgcaaatcccagcccaaccagcctcaagtttgggagctgatacaatgtctgcgggaggtggcggcccattgggcgacaataaccaaggtgccgatggagtgggcaatgcctcgggagattggcattgcgattccacgtggatgggggacagagtcgtcaccaagtccacccgaacctgggtgctgcccagctacaacaaccaccagtaccgagagatcaaaagcggctccgtcgacggaagcaacgccaacgcctactttggatacagcaccccctgggggtactttgactttaaccgcttccacagccactggagcccccgagactggcaaagactcatcaacaactactggggcttcagaccccggtccctcagagtcaaaatcttcaacattcaagtcaaagaggtcacggtgcaggactccaccaccaccatcgccaacaacctcacctccaccgtccaagtgtttacggacgacgactaccagctgccctacgtcgtcggcaacgggaccgagggatgcctgccggccttccctccgcaggtctttacgctgccgcagtacggttacgcgacgctgaaccgcgacaacaccgaaaatcccaccgagaggagcagcttcttctgcctagagtactttcccagcaagatgctgagaacgggcaacaactttgagtttacctacaactttgaggaggtgcccttccactccagcttcgctcccagtcagaacctcttcaagctggccaacccgctggtggaccagtacttgtaccgcttcgtgagcacaaataacactggcggagtccagttcaacaagaacctggccgggagatacgccaacacctacaaaaactggttcccggggcccatgggccgaacccagggctggaacctgggctccggggtcaaccgcgccagtgtcagcgccttcgccacgaccaataggatggagctcgagggcgcgagttaccaggtgcccccgcagccgaacggcatgaccaacaacctccagggcagcaacacctatgccctggagaacactatgatcttcaacagccagccggcgaacccgggcaccaccgccacgtacctcgagggcaacatgctcatcaccagcgagagcgagacgcagccggtgaaccgcgtggcgtacaacgtcggcgggcagatggccaccaacaaccagagctccaccactgcccccgcgaccggcgcgtacaacctccaggaaatcgtgcccggcagcgtgtggatggagagggacgtgtacctccaaggacccatctgggccaagatcccagagacgggggcgcactttcacccctctccggccatgggcggattcggactcaaacacccaccgcccatgatgctcatcaagaacacgcctgtgcccggaaatatcaccagcttctcggacgtgcccgtcagcagcttcatcacccagtacagcaccgggcaggtcaccgtggagatggagtgggagctcaagaaggaaaactccaagaggtggaacccagagatccagtacacaaacaactacaacgacccccagtttgtggactttgccccggacagcaccggggaatacagaaccaccagacctatcggaacccgataccttacccgacccctttaa

SEQ ID NO: 801 - DNA, 2175 bp, Artificial Sequence
  source: /note="Description of Artificial Sequence: Synthetic polynucleotide"
atgtcttttgttgatcaccctccagattggttggaagaagttggtgaaggtcttcgcgagtttttgggccttgaagcgggcccaccgaaaccaaaacccaatcagcagcatcaagatcaagcccgtggtcttgtgctgcctggttataactatctcggacccggaaacggtctcgatcgaggagagcctgtcaacagggcagacggggtcgcgcgagagcacgacatctcgtacaacgagcagcttgaggcgggagacaacccctacctcaagtacaaccacgcggacgccgagtttcaggagaagctcgccgacgacacatccttcgggggaaacctcggaaaggcagtctttcaggccaagaaaagggttctcgaaccttttggcctggttgaagagggtgctaagacggcccctaccggaaagcggatagacgaccactttccaaaaagaaagaaggcccggaccgaagaggactccaagccttccacctcgtcagacgccgaagctggacccagcggatcccagcagctgcaaatcccagcccaaccagcctcaagtttgggagctgatacaatgtctgcgggaggtggcggcccattgggcgacaataaccaaggtgccgatggagtgggcaatgcctcgggagattggcattgcgattccacgtggatgggggacagagtcgtcaccaagtccacccgaacctgggtgctgcccagctacaacaaccaccagtaccgagagatcaaaagcggctccgtcgacggaagcaacgccaacgcctactttggatacagcaccccctgggggtactttgactttaaccgcttccacagccactggagcccccgagactggcaaagactcatcaacaactactggggcttcagaccccggtccctcagagtcaaaatcttcaacattcaagtcaaagaggtcacggtgcaggactccaccaccaccatcgccaacaacctcacctccaccgtccaagcgtttacggacgacgactaccagctgccctacgtcgtcggcaacgggaccgagggatgcctgccggccttccctccgcaggtctttacgctgccgcagtacggttacgcgacgctgaaccgcgacaacacagaaaatcccaccgagaggagcagcttcttctgcctagagtactttcccagcaagatgctgagaacgggcaacaactttgagtttacctacaactttgaggaggtgcccttccactccagcttcgctcccagtcagaacctcttcaagctggccaacccgctggtggaccagtacttgtaccgcttcgtgagcacaaataacactggcggagtccagttcaacaagaacctggccgggagatacgccaacacctacaaaaactggttcccggggcccatgggccgaacccagggctggaacctgggctccggggtcaaccgcgccagtgtcagcgccttcgccacgaccaataggatggagctcgagggcgcgagttaccaggtgcccccgcagccgaacggcatgaccaacaacctccagggcagcaacacctatgccctggagaacactatgatcttcaacagccagccggcgaacccgggcaccaccgccacgtacctcgagggcaacatgctcatcaccagcgagagcgagacgcagccggtgaaccgcgtggcgtacaacgtcggcgggcagatggccaccaacaaccagagctccaccactgcccccgcgaccggcacgtacaacctccaggaaatcgtgcccggcagcgtgtggatggagagggacgtgtacctccaaggacccatctgggccaagatcccagagacgggggcgcactttcacccctctccggccatgggcggattcggactcaaacacccaccgcccatgatgctcatcaagaacacgcctgtgcccggaaatatcaccagcttctcggacgtgcccgtcagcagcttcatcacccagtacagcaccgggcaggtcaccgtggagatggagtgggagctcaagaaggaaaactccaagaggtggaacccagagatccagtacacaaacaactacaacgacccccagtttgtggactttgccccggacagcaccggggaatacagaaccaccagacctatcggaacccgataccttacccgacccctttaa

SEQ ID NO: 802 - DNA, 2175 bp, Artificial Sequence
  source: /note="Description of Artificial Sequence: Synthetic polynucleotide"
atgtcttttgttgatcaccctccagattggttggaagaagttggtgaaggtcttcgcgagtttttgggccttgaagcgggcccaccgaaaccaaaacccaatcagcagcatcaagatcaagcccgtggtcttgtgctgcctggttataactatctcggacccggaaacggtctcgatcgaggagagcctgtcaacagggcagacgaggtcgcgcgagagcacgacatctcgtacaacgagcagcttgaggcgggagacaacccctacctcaagtacaaccacgcggacgccgagtttcaggagaagctcgccgacgacacatccttcgggggaaacctcggaaaggcagtctttcaggccaagaaaagggttctcgaaccttttggcctggttgaagagggtgctaagacggcccctaccggaaagcggatagacgaccactttccaaaaagaaagaaggcccggaccgaagaggactccaagccttccacctcgtcagacgccgaagctggacccagcggatcccagcagctgcaaatcccagcccaaccagcctcaagtttgggagctgatacaatgtctgcgggaggtggcggcccattgggcgacaataaccaaggtgccgatggagtgggcaatgcctcgggagattggcattgcgattccacgtggatgggggacagagtcgtcaccaagtccacccgaacctgggtgctgcccagctacaacaaccaccagtaccgagagatcaaaagcggctccgtcgacggaagcaacgccaacgcctactttggatacagcaccccctgggggtactttgactttaaccgcttccacagccactggagcccccgagactggcaaagactcatcaacaactactggggcttcagaccccggtccctcagagtcaaaatcttcaacattcaagtcaaagaggtcacggtgcaggactccaccaccaccatcgccaacaacctcacctccaccgtccaagtgtttacggacgacgactaccagctgccctacgtcgtcggcaacgggaccgagggatgcctgccggccttccctccgcaggtctttacgctgccgcagtacggttacgcgacgctgaaccgcgacaacacagaaaatcccaccgagaggagcagcttcttctgcctagagtactttcccagcaagatgctgagaacgggcaacaactttgagtttacctacaactttgaggaggtgcccttccactccagcttcgctcccagtcagaacctcttcaagctggccaacccgctggtggaccagtacttgtaccgcttcgtgagcacaaataacactggcggagtccagttcaacaagaacctggccgggagatacgccaacacctacaaaaactggttcccggggcccatgggccgaacccagggctggaacctgggctccggggtcaaccgcgccagtgtcagcgccttcgccacgaccaataggatggagctcgagggcgcgagttactaggtgcccccgcagccgaacggcatgaccaacaacctccagggcagcaacacctatgccctggagaacactatgatcttcaacagccagccggcgaacccgggcaccaccgccacgtacctcgagggcaacatgctcatcaccagcgagagcgagacgcagccggtgaaccgcgtggcgtacaacgtcggcgggcagatggccaccaacaaccagagctccaccactgcccccgcgaccggcacgtacaacctccaggaaatcgtgcccggcagcgtgtggatggagggggacgtgtacctccaaggacccatctgggccaagatcccagagacgggggcgcactttcacccctctccggccatgggcggattcggactcaagcacccaccgcccatgatgctcatcaagaacacgcctgtgcccggaaatatcaccagcttctcggacgtgcccgtcagcagcttcatcacccagtacagcaccgggcaggtcaccgtggagatggagtgggagctcaagaaggaaaactccaagaggtggaacccagagatccagtacacaaacaactacaacgacccccagtttgtggactttgccccggacagcaccggggaatacagaaccaccagacctatcggaacccgataccttacccgacccctttaa

SEQ ID NO: 803 - DNA, 2175 bp, Artificial Sequence
  source: /note="Description of Artificial Sequence: Synthetic polynucleotide"
atgtcttttgttgatcaccctccagattggttggaagaagttggtgaaggtcttcgcgagtttttgggccttgaagcgggcccaccgaaaccaaaacccaatcagcagcatcaagatcaagcccgtggtcttgtgctgcctggttataactatctcggacccggaaacggtctcgatcgaggagagcctgtcaacagggcagacgaggtcgcgcgagagcacgacatctcgtacaacgagcagcttgaggcgggagacaacccctacctcaagtacaaccacgcggacgccgagtttcaggagaagctcgccgacgacacatccttcgggggaaacctcggaaaggcagtctttcaggccaagaaaagggttctcgaaccttttggcctggttgaagagggtgctaagacggcccctaccggaaagcggatagacgaccactttccaaaaagaaagaaggtccggaccgaagaggactccaagccttccacctcgtcagacgccgaagctggacccagcggatcccagcagctgcaaatcccagcccaaccagcctcaagtttgggagctgatacaatgtctgcgggaggtggcggcccattgggcgacaataaccaaggtgccgatggagtgggcaatgcctcgggagattggcattgcgattccacgtggatgggggacagagtcgtcaccaagtccacccgaacctgggtgctgcccagctacaacaaccaccagtaccgagagatcaaaagcggctccgtcgacggaagcaacgccaacgcctactttggatacagcaccccctgggggtactttgactttaaccgcttccacagccactggagcccccgagactggcaaagactcatcaacaactactggggcttcagaccccggtccctcagagtcaaaatcttcaacattcaagtcaaagaggtcacggtgcaggactccaccaccaccatcgccaacaacctcacctccaccgtccaagtgtttacggacgacgactaccagctgccctacgtcgtcggcaacgggaccgagggatgcctgccggccttccctccgcaggtctttacgctgccgcagtacggttacgcgacgctgaaccgcgacaacacagaaaatcccaccgagaggagcagcttcttctgcctagagtactttcccagcaagatgctgagaacgggcaacaactttgagtttacctacaactttgaggaggtgcccttccactccagcttcgctcccagtcagaacctcttcaagctggccaacccgctggtggaccagtacttgtaccgcttcgtgagcacaaataacactggcggagtccagttcaacaagaacctggccgggagatacgccaacacctacaaaaactggttcccggggcccatgggccgaacccagggctggaacctgggctccggggtcaaccgcgccagtgtcagcgccttcgccacgaccaataggatggagctcgagggcgcgagttaccaggtgcccccgcagccgaacggcatgaccaacaacctccagggcagcaacacctatgccctggagaacactatgatcttcaacagccagccggcgaacccgggcaccaccgccacgtacctcgagggcaacatgctcatcaccagcgagagcgagacgcagccggtgaaccgcgtggcgtacaacgtcggcgggcagatggccaccaacaaccagagctccaccactgcccccgcgaccggcacgtacaacctccaggaaatcgtgcccggcagcgtgtggatggagagggacgtgtacctccaaggacccatctgggccaagatcccagagacgggggcgcactttcacccctctccggccatgggcggattcggactcaaacacccaccgcccatgatgctcatcaagaacacgcctgtgcccggaaatatcaccagcttctcggacgtgcccgtcagcagcttcatcacccagtacagcaccgggcaggtcaccgtggagatggagtgggagctcaagaaggaaaactccgagaggtggaacccagagatccagtacacaaacaactacaacgacccccagtttgtggactttgccccggacagcaccggggaatacagaaccaccagacctattggaacccgataccttacccgacccctttaa

SEQ ID NO: 804 - DNA, 2175 bp, Artificial Sequence
  source: /note="Description of Artificial Sequence: Synthetic polynucleotide"
atgtcttttgttgatcaccctccagattggttggaagaagttggtgaaggtcttcgcgagtttttgggccttgaagcgggcccaccgaaaccaaaacccaatcagcagcatcaagatcaagcccgtggtcttgtgctgcctggttataactatctcggacccggaaacggtctcgatcgaggagagcctgtcaacagggcagacgaggtcgcgcgagagcacgacatctcgtacagcgagcagcttgaggcgggagacaacccctacctcaagtacaaccacgcggacgccgagtttcaggagaagctcgccgacgacacatccttcgggggaaacctcggaaaggcagtctttcaggccaagaaaagggttctcgaaccttttggcctggttgaagagggtgctaagacggcccctaccggaaagcggatagacgaccactttccaaaaagaaagaaggcccggaccgaagaggactccaagccttccacctcgtcagacgccgaagctggacccagcggatcccagcagctgcaaatcccagcccaaccagcctcaagtttgggagctgatacaatgtctgcgggaggtggcggcccattgggcgacaataaccaaggtgccgatggagtgggcaatgcctcgggagattggcattgcgattccacgtggatgggggacagagtcgtcaccaagtccacccgaacctgggtgctgcccagctacaacaaccaccagtaccgagagatcaaaagcggctccgtcgacggaagcaacgccaacgcctactttggatacagcaccccctgggggtactttgactttaaccgcttccacagccactggagcccccgagactggcaaagactcatcaacaactactggggcttcagaccccggtccctcagagtcaaaatcttcaacattcaagtcaaagaggtcacggtgcaggactccaccaccaccatcgccaacaacctcacctccaccgtccaagtgtttacggacgacgactaccagctgccctacgtcgtcggcaacgggaccgagggatgcctgccggccttccctccgcaggtctttacgctgccgcagtacggttacgcgacgctgaaccgcgacaacacagaaaatcccaccgagaggagcagcttcttctgcctagagtactttcccagcaagatgctgagaacgggcaacaactttgagtttacctacaactttgaggaggtgcccttccactccagcttcgctcccagtcagaacctcttcaagctggccaacccgctggtggaccagtacttgtaccgcttcgtgagcacaaataacactggcggagtccagttcaacaagaacctggccgggagatacgccaacacctacaaaaactggttcccggggcccatgggccgaacccagggctggaacctgggctccggggtcaaccgcgccagtgtcagcgccttcgccacgaccaataggatggagctcgagggcgcgagttaccaggtgcccccgcagccgaacggcatgaccaacaacctccagggcagcaacacctatgccctggagaacactatgatcttcaacagccagccggcgaacccgggcaccaccgccacgtacctcgagggcaacatgctcatcaccagcgagagcgagacgcagccggtgaaccgcgtggcgtacaacgtcggcgggcagatggccaccaacaaccagagctccaccactgcccccgcgaccggcacgtacaacctccaggaaatcgtgcccggcagcgtgtggatggagagggacgtgtacctccaaggacccatctgggccaagatcccagagacgggggcgcactttcacccctctccggccatgggcggattcggactcaaacacccaccgcccatgatgctcatcaagaacacgcctgtgcccggaaatatcaccagcttctcggacgtgcccgtcagcagcttcatcacccagtacagcaccgggcaggtcaccgtggagatggagtgggagctcaagaaggaaaactccaagaggtggaacccagagatccagtacacaaacaactacaacgacccccagtttgtggactttgccccggacagcaccggggaatacagaaccgccagacctatcggaacccgataccttacccgacccctttaa

SEQ ID NO: 805 - DNA, 2175 bp, Artificial Sequence
  source: /note="Description of Artificial Sequence: Synthetic polynucleotide"
atgtcttttgttgatcaccctccagattggttggaagaagttggtgaaggtcttcgcgagtttttgggccctgaagcgggcccaccgaaaccaaaacccaatcagcagcatcaagatcaagcccgtggtcttgtgctgcctggttataactatctcggacccggaaacggtctcgatcgaggagagcctgtcaacagggcagacgaggtcgcgcgagagcacgacatctcgtacaacgagcagcttgaggcgggagacaacccctacctcaagtacaaccacgcggacgccgagtttcaggagaagctcgccgacgacacatccttcgggggaaacctcggaaaggcagtctttcaggccaagaaaagggttctcgaaccttttggcctggttgaagagggtgctaagacggcccctaccggaaagcggatagacgaccactttccaaaaagaaagaaggcccggaccgaagaggactccaagccttccacctcgtcagacgccgaagctggacccagcggatcccagcagctgcaaatcccagcccaaccagcctcaagtttgggagctgatacaatgtctgcgggaggtggcggcccattgggcgacaataaccaaggtgccgatggagtgggcaatgcctcgggagattggcattgcgattccacgtggatgggggacagagtcgtcaccaagtccacccgaacctgggtgctgcccagctacaacaaccaccagtaccgagagatcaaaagcggctccgtcgacggaagcaacgccaacgcctactttggatacagcaccccctgggggtactttgactttaaccgcttccacagccactggagcccccgagactggcaaagactcatcaacaactactggggcttcagaccccggtccctcagagtcaaaatcttcaacattcaagtcaaagaggtcacggtgcaggactccaccaccaccatcgccaacaacctcacctccaccgtccaagtgtttacggacgacgactaccagctgccctacgtcgtcggcaacgggaccgagggatgcctgccggccttccctccgcaggtctttacgctgccgcagtacggttacgcgacgctgaaccgcgacaacacagaaaatcccaccgagaggagcagcttcttctgcctagagtactttcccagcaagatgctgagaacgggcaacaactttgagtttacctacaactttgaggaggtgcccttccactccagcttcgctcccagtcagaacctcttcaagctggccaacccgctggtggaccagtacttgtaccgcttcgtgagcacaaataacactggcggagtccagttcaacaagaacctggccgggagatacgccaacacctacaaaaactggttcccggggcccatgggccgaacccagggctggaacctgggctccggggtcaaccgcgccagtgtcagcgccttcgccacgaccaataggatggagctcgagggcgcgagttaccaggtgcccccgcagccgaacggcatgaccaacaacctccagggcagcaacacctatgccctggagaacactatgatcttcaacagccagccggcgaacccgggcaccaccgccacgtacctcgagggcaacatgctcatcaccagcgagagcgagacgcagccggtgaaccgcgtggcgtacaacgtcggcgggcagatgaccaccaacaaccagagctccaccactgcccccgcgaccggcacgtacaacctccaggaaatcgtgcccggcagcgtgtggatggagagggacgtgtacccccaaggacccatctgggccaagatcccagagacgggggcgcactttcacccctctccggccatgggcggattcggactcaaacacccaccgcccatgatgctcatcaagaacacgcctgtgcccggaaatatcaccagcttctcggacgtgcccgtcagcagcttcatcacccagtacagcaccgggcaggtcaccgtggagatggagtgggagctcaagaaggaaaactccaagaggtggaacccagagatccagtacacaaacaactacaacgacccccagtttgtggactttgccccggacagcaccggggaatacaggaccaccagacctatcggaacccgataccttacccgacccctttaa

SEQ ID NO: 806 - DNA, 2175 bp, Artificial Sequence
  source: /note="Description of Artificial Sequence: Synthetic polynucleotide"
atgtcttttgttgatcaccctccagattggttggaagaagttggtgaaggtcttcgcgagtttttgggccttgaagcgggcccaccgaaaccaaaacccaatcagcagcatcaagatcaagcccgtggtcttgtgctgcctggttataactatctcggacccggaaacggtctcgatcgaggagagcctgtcaacagggcagacgaggtcgcgcgagagcacgacatctcgtacaacgagcagcttgaggcgggagacaacccctacctcaagtacaaccacgcggacgccgagtttcaggagaagctcgccgacgacacatccttcgggggaaacctcggaaaggcagtctttcaggccaagaaaagggttctcgaaccttttggcctggttgaagagggtgctaagacggcccctaccggaaagcggatagacgaccactttccaaaaagaaagaaggcccggaccgaagaggactccaagccttccacctcgtcagacgccgaagctggacccagcggatcccagcagctgcaaatcccagcccaaccagcctcaagtttgggagctgatacaatgtctgcgggaggtggcggcccattgggcgacaataaccaaggtgccgatggagtgggcaatgcctcgggagattggcattgcgattccacgtggatgggggacagagtcgtcaccaagtccacccgaacctgggtgctgcccagctacaacaaccaccagtaccgagagatcaaaagcggctccgtcgacggaagcaacgccaacgcctactttggatacagcaccccctgggggtactttgactttaaccgcttccacagccactggagcccccgagactggcaaagactcatcaacaactactggggcttcagaccccggtccctcagagtcaaaatcttcaacattcaagtcaaagaggtcacggtgcaggactccaccaccaccatcgccaacaacctcacctccaccgtccaagtgtttacggacgacgactaccagctgccctacgtcgtcggcaacgggaccgagggatgcctgccggccttccctccgcaggtctttacgctgccgcagtacggttacgcgacgctgaaccgcgacaacacagaaaatcccaccgagaggagcagcttcctctgcctagagtactttcccagcaagatgctgagaacgggcaacaactttgagtttacctacaactttgaggaggtgcccttccactccagcttcgctcccagtcagaacctcttcaagctggccaacccgctggtggaccagtacttgtaccgcttcgtgagcacaaataacactggcggagtccagttcaacaagaacctggccgggagatacgccaacacctacaaaaactggttcccggggcccatgggccgaacccagggctggaacctgggctccggggtcaaccgcgccagtgtcagcgccttcgccacgaccaataggatggagctcgagggcgcgagttaccaggtgcccccgcagccgaacggcatgaccaacaacctccagggcagcaacacctatgccctggagaacactatgatcttcaacagccagccggcgaacccgggcaccaccgccacgtacctcgagggcaacatgctcatcaccagcgagagcgagacgcagccggtgaaccgcgtggcgtacaacgtcggcgggcagatggccaccaacaaccagagctccaccactgcccccgcgaccggcacgtacaacctccaggaaatcgtgcccggcagcgtgtggatgaagagggacgtgtacctccaaggacccatctgggccaagatcccagagacgggggcgcactttcacccctctccggccatgggcggattcggactcaaacacccaccgcccatgatgctcatcaagaacacgcctgtgcccggaaatatcaccagcttctcggacgtgcccgtcagcagcttcatcacccagtacagcaccgggcaggtcaccgtggagatggagtgggagctcaagaaggaaaactccaagaggtggaacccagagatccagtacacaaacaactacaacgacccccagtttgtggactttgccccggacagcaccggggaatacagaaccaccagacctatcggaacccgataccttacccgacccctttaa

SEQ ID NO: 807 - DNA, 2175 bp, Artificial Sequence
  source: /note="Description of Artificial Sequence: Synthetic polynucleotide"
atgtcttttgttgatcaccctccagattggttggaagaagttggtgaaggtcttcgcgagtttttgggccttgaggcgggcccaccgaaaccaaaacccaatcagcagcatcaagatcaagcccgtggtcttgtgctgcctggttataactatctcggacccggaaacggtctcgatcgaggagagcctgtcaacagggcagacgaggtcgcgcgagagcacgacatctcgtacaacgagcagcttgaggcgggagacaacccctacctcaagtacaaccacgcggacgccgagtttcaggagaagctcgccgacgacacatccttcgggggaaacctcggaaaggcagtctttcaggccaagaaaagggttctcgaaccttttggcctggttgaagagggtgctaagacggcccctaccggaaagcggatagacgaccactttccaaaaagaaagaaggcccggaccgaagaggactccaagccttccaccccgtcagacgccgaagctggacccagcggatcccagcagctgcaaatcccagcccaaccagcctcaagtttgggagctgatacaatgtctgcgggaggtggcggcccattgggcgacaataaccaaggtgccgatggagtgggcaatgcctcgggagattggcattgcgattccacgtggatgggggacagagtcgtcaccaagtccacccgaacctgggtgctgcccagctacaacaaccaccagtaccgagagatcaaaagcggctccgtcgacggaagcaacgccaacgcctactttggatacagcaccccctgggggtactttgactttaaccgcttccacagccactggagcccccgagactggcaaagactcatcaacaactactggggcttcagaccccggtccctcagagtcaaaatcttcaacattcaagtcaaagaggtcacggtgcaggactccaccaccaccatcgccaacaacctcacctccaccgtccaagtgtttacggacgacgactaccagctgccctacgtcgtcggcaacgggaccgagggatgcctgccggccttccctccgcaggtctttacgctgccgcagtacggttacgcgacgctgaaccgcgacaacacagaaaatcccaccgagaggagcagcttcttctgcctagagtactttcccagcaagatgctgagaacgggcaacaactttgagtttacctacaactttgaggaggtgcccttccactccagcttcgctcccagtcagaacctcttcaagctggccaacccgctggtggaccagtacttgtaccgcttcgtgagcacaaataacactggcggagtccagttcaacaagaacctggccgggagatacgccaacacctacaaaaactggttcccggggcccatgggccgaacccagggctggaacctgggctccggggtcaaccgcgccagtgtcagcgccttcgccacgaccaataggatggagctcgagggcgcgagttaccaggtgcccccgcagccgaacggcatgaccaacaacctccagggcagcaacacctatgccctggagaacactatgatcttcaacagccagccggcgaacccgggcaccaccgccacgtacctcgagggcaacatgctcatcaccagcgagagcgagacgcagccggtgaaccgcgtggcgtacaacgtcggcgggcagatggccaccaacaaccagagctccaccactgcccccgcgaccggcacgtacaacctccaggaaatcgtgcccggcagcgtgtggatggagagggacgtgtacctccaaggacccatctgggccaagatcccagagacgggggcgcactttcacccctctccggccatgggcggattcggactcaaacacccaccgcccatgatgctcatcaagaacacgcctgtgcccggaaatatcaccagcttctcggacgtgcccgtcagcagcttcatcacccagtacagcaccgggcaggtcaccgtggagatggagtgggagctcaagaaggaaaactccaagaggtggaacccagagatccagtacacaaacaactacaacgacccccagtttgtggactttgccccggacagcaccggggaatacagaaccaccagacctatcggaacccgataccttacccgacccctttaa

SEQ ID NO: 808 - DNA, 2175 bp, Artificial Sequence
  source: /note="Description of Artificial Sequence: Synthetic polynucleotide"
atgtcttttgttgatcaccctccagattggttggaagaagttggtgaaggtcttcgcgagtttttgggccttgaagcgggcccaccgaaaccaaaacccaatcagcagcatcaagatcaagcccgtggtcttgtgctgcctggttataactatctcggacccggaaacggtctcgatcgaggagagcctgtcaacagggcagacgaggtcgcgcgagagcacgacatctcgtacaacgagcagcttgaggcgggagacaacccctacctcaagtacaaccacgcggacgccgagtttcaggagaagctcgccgacgacacatccttcgggggaaacctcggaaaggcagtctttcaggccaagaaaagggttctcgaaccttttggcctggttgaagagggtgctaagacggcccctaccggaaagcggatagacgaccactttccaaaaagaaagaaggcccggaccgaagaggactccaagccttccacctcgtcagacgccgaagctggacccagcggatcccagcagctgcaaatcccagcccaaccagcctcaagtttgggagctgatacaatgtctgcgggaggtggcggcccattgggcgacaataaccaaggtgccgatggagtgggcaatgcctcgggagattggcattgcgattccacgtggatgggggacagagtcgtcaccaagtccacccgaacctgggtgctgcccagctacaacaaccaccagtaccgagagatcaaaagcggctccgtcgacggaagcaacgccaacgcctactttggatacagcaccccctgggggtactttgactttaaccgcttccacagccactggagcccccgagactggcaaagactcatcaacaactactggggcttcagaccccggtccctcagagtcaaaatcttcaacattcaagtcaaagaggtcacggtgcaggactccaccaccaccatcgccaacaacctcacctccaccgtccaagtgtttacggacgacgactaccagctgccctacgtcgtcggcaacgggaccgagggatgcctgccggccttccctccgcaggtctttacgctgccgcagtacggttacgcgacgctgaaccgcgacaacacagaaaatcccaccgagaggagcagcttcttctgcctagagtactttcccagcaagatgctgagaacgggcaacaactttgagtttacctacaactttgaggaggtgcccttccactccagcttcgctcccagtcagaacctcttcaagctggccaacccgctggtggaccagtacttgtaccgcttcgtgagcacaaataacactggcggagtccagttcaacaagaacctggccgggagatacgccaacacccacaaaaactggttcccggggcccatgggccgaacccagggctggaacctgggctccggggtcaaccgcgccagtgtcagcgccttcgccacgaccaataggatggagctcgagggcgcgagttaccaggtgcccccgcagtcgaacggcatgaccaacaacctccggggcagcaacacctatgccctggagaacactatgatcttcaacagccagccggcgaacccgggcaccaccgccacgtacctcgagggcaacatgctcatcaccagcgagagcgagacgcagccggtgaaccgcgtggcgtacaacgtcggcgggcagatggccaccaacaaccagagctccaccactgcccccgcgaccggcacgtacaacctccaggaaatcgtgcccggcagcgtgtggatggagagggacgtgtacctccaaggacccatctgggccaagatcccagagacgggggcgcactttcacccctctccggccatgggcggattcggactcaaacacccaccgcccatgatgctcatcaagaacacgcctgtgcccggaaatatcaccagcttctcggacgtgcccgtcagcagcttcatcacccagtacagcaccgggcaggtcaccgtggagatggagtgggagctcaagaaggaaaactccaagaggtggaacccagagatccagtacacaaacaactacaacgacccccagtttgtggactttgccccggacagcaccggggaatacagaaccaccagacctatcggaacccgataccttacccgacccctttaa

SEQ ID NO: 809 - DNA, 2175 bp, Artificial Sequence
  source: /note="Description of Artificial Sequence: Synthetic polynucleotide"
atgtcttttgttgatcaccctccagattggttggaagaagttggtgaaggtcttcgcgagtttttgggccttgaagcgggcccaccgaaaccaaaacccaatcagcagcatcaagatcaagcccgtggtcttgtgctgcctggttataactatctcggacccggaaacggtctcgatcgaggagagcctgtcaacagggcagacgaggtcgcgcgagagcacgacatctcgtacaacgagcagcttgaggcgggagacaacccctacctcaagtacaaccacgcggacgccgagtttcaggagaagctcgccgacgacacatccttcgggggaaacctcggaaaggcagtctttcaggccaagaaaagggttctcgaaccttttggcctggttgaagagggtgctaagacggcccctaccggaaagcggatagacgaccactttccaaaaagaaagaaggcccggaccgaagaggactccaagccttccacctcgtcagacgccgaagctggacccagcggatcccagcagctgcaaatcccagcccaaccagcctcaagtttgggagctgatacaatgtctgcgggaggtggcggcccattgggcgacaataaccaaggtgccgatggagtgggcaatgcctcgggagattggcattgcgattccacgtggatgggggacagagtcgtcaccaagtccacccgaacctgggtgctgcccagctacaacaaccaccagtaccgagagatcaaaagcggctccgtcgacggaagcaacgccaacgcctactttggatacagcaccccctgggggtactttgactttaaccgcttccacagccactggagcccccgagactggcaaagactcatcaacaactactggggcttcagaccccggtccctcagagtcaaaatcttcaacattcaagtcaaagaggtcacggtgcaggactccaccaccaccatcgccaacaacctcacctccaccgtccaagtgtttacggacgacgactaccagctgccctacgtcgtcggcaacgggaccgagggatgcctgccggccttccctccgcaggtctttacgctgccgcagtacggttacgcgacgctgaaccgcgacaacacagaaaatcccaccgagaggagcagcttcttctgcctagagtactttcccagcaagatgctgagaacgggcaacaactttgagtttacctacaactttgaggaggtgcccttccactccagcttcgctcccagtcagaacctcttcaagctggccaacccgctggtggaccagtacttgtaccgcttcgtgagcacaaataacactggcggagtccagttcaacaagaacctggccgggagatacgccaacacctacaaaaactggttcccggggcccatgggccgaacccagggctggaacctgggctccggggtcaaccgcgccagtgtcagcgccttcgccacgaccaataggatggagctcgagggcgcgagttaccaggtgcccccgcagccgaacggcatgaccaacaacctccagggcagcaacacctatgccctggagaacactatgatcttcaacagccagccggcgaacccgggcaccaccgccacgtacctcgagggcaacatgctcatcaccagcgagagcgagacgcagccggtgaaccgcgtggcgtacagcgtcggcgggcagatggccaccaacaaccagagctccaccactgcccccacgaccggcacgtacaacctccaggaaatcgtgcccggcagcgtgtggatggagagggacgtgtacctccaaggacccatctgggccaagatcccagagacgggggcgcactttcacccctctccggccatgggcggattcagactcaaacacccaccgcccatgatgctcatcaagaacacgcctgtgcccggaaatatcaccagcttctcggacgtgcccgtcagcagcttcatcacccagtacagcaccgggcaggtcaccgtggagatggagtgggagctcaagaaggaaaactccaagaggtggaacccagagatccagtacacaaacaactacaacgacccccagtttgtggactttgccccggacagcaccggggaatacagaaccaccagacctatcggaacccgataccttacccgacccctttaa

SEQ ID NO: 810 - DNA, 2175 bp, Artificial Sequence
  source: /note="Description of Artificial Sequence: Synthetic polynucleotide"
atgtcttttgttgatcaccctccagattggttggaagaagttggtgaaggtcttcgcgagtttttgggccttgaagcgggcccaccgaaaccaaaacccaatcagcagcatcaagatcaagcccgtggtcttgtgctgcctggttataactatctcggacccggaaacggtctcgatcgaggagagcctgtcaacagggcagacgaggtcgcgcgagagcacgacatctcgtacaacgagcagcttgaggcgggagacaacccctacctcaagtacaaccacgcggacgccgagtttcaggagaagctcgccgacgacacatccttcgggggaaacctcggaaaggcagtctttcaggccaagaaaagggttctcgaaccttttggcctggttgaagagggtgctaagacggcccctaccggaaagcggatagacgaccactttccaaaaagaaagaaggcccggaccgaagaggactccaagccttccacctcgtcagacgccgaagctggacccagcggatcccagcagctgcaaatcccagcccaaccagcctcaagtttgggagctgatacaatgtctgcgggaggtggcggcccattgggcgacaataaccaaggtgccgatggagtgggcaatgcctcgggagattggcattgcgattccacgtggatgggggacagagtcgtcaccaagtccacccgaacctgggtgctgcccagctacaacaaccaccagtaccgagagatcaaaagcggctccgtcgacggaagcaacgccaacgcctactttggatacagcaccccctgggggtactttgactttaaccgcttccacagccactggagcccccgagactggcaaagactcatcaacaactactggggcttcagaccccggtccctcagagtcaaaatcttcaacattcaagtcaaagaggtcacggtgcaggactccaccaccaccatcgccaacaacctcacctccaccgtccaagtgtttacggacgacgactaccagctgccctacgtcgtcggcaacgggaccgagggatgcctgccggccttccctccgcaggtctttacgctgccgcagtacggttacgcgacgctgaaccgcgacaacacagaaaatcccaccgagaggagcagcttcttctgcctagagtactttcccagcaagatgctgagaacgggcaacaactttgagtttacctacaactttgaggaggtgcccttccactccagcttcgctcccagtcagaacctcttcaagctggccaacccgctggtggaccagtacttgtaccgcttcgtgagcacaaataacactggcggagtccagttcaacaagaacctggccgggagatacgccaacacctacaaaaactggttcccggggcccatgggccgaacccagggctggaacctgggctccggggtcaaccgcgccagtgtcagcgccttcgccgcgaccaataggatggagctcgagggcgcgagttaccaggtgcccccgcagccgaacggcatgaccaacaacctccagggcagcaacacctatgccctggagaacactatgatcttcaacagccagccggcgaacccgggcaccaccgccacgtacctcgagggcaacatgctcatcaccagcgagagcgagacgcagccggtgaaccgcgtggcgtacaacgtcggcgggcagatggccaccaacaaccagagctccaccactgcccccgcgaccggcacgtacaacctccaggaaatcgtgcccggcggcgtgtggatggagagggacgtgtacctccaaggacccatctgggccaagatcccagagacgggggcgcactttcacccctctccggccatgggcggattcggactcaaacacccaccgcccatgatgctcatcaagaacacgcctgtgcccggaaataccaccagcttctcggacgtgcccgtcagcagcttcatcacccagtacagcaccgggcaggtcaccgtggagatggagtgggagctcaagaaggaaaactccaagaggtggaacccagagatccagtacacaaacaactacaacgacccccagtttgtggactttgccccggacagcaccggggaatacagaaccaccagacctatcggaacccgataccttacccgacccctttaa

SEQ ID NO: 811 - DNA, 2175 bp, Artificial Sequence
  source: /note="Description of Artificial Sequence: Synthetic polynucleotide"
atgtcttttgttgatcaccctccagattggttggaagaagttggtgaaggtcttcgcgagtttttgggccttgaagcgggcccaccgaaaccaaaacccaatcagcagcatcaagatcaagcccgtggtcttgtgctgcctggttataactatctcggacccggaaacggtctcgatcgaggagagcctgtcaacagggcagacgaggtcgcgcgagagcacgacatctcgtacaacgagcagcttgaggcgggagacaacccctacctcaagtacaaccacgcggacgccgagtttcaggagaagctcgccgacgacacatccttcgggggaaacctcggaaaggtagtctttcaggccaagaaaagggttctcgaaccttttggcctggttgaagagggtgctaagacggcccctaccggaaagcggatagacgaccactttccaaaaagaaagaaggcccggaccgaagaggactccaagccttccacctcgtcagacgccgaagctggacccagcggatcccagcagctgcaaatcccagcccaaccagcctcaagtttgggagctgatacaatgtctgcgggaggtggcggcccattgggcggcaataaccaaggtgccgatggagtgggcaatgcctcgggagattggcattgcgattccacgtggatgggggacagagtcgtcaccaagtccacccgaacctgggtgctgcccagctacaacaaccaccagtaccgagagatcaaaagcggctccgtcgacggaagcaacgccaacgcctactttggatacagcaccccctgggggtactttgactttaaccgcttccacagccactggggcccccgagactggcaaagactcatcaacaactactggggcttcagaccccggtccctcagagtcaaaatcttcaacattcaagtcaaagaggtcacggtgcaggactccaccaccaccatcgccaacaacctcacctccaccgtccaagtgtttacggacgacgactaccagctgccctacgtcgtcggcaacgggaccgagggatgcctgccggccttccctccgcaggtctttacgctgccgcagtacggttacgcgacgctgaaccgcgacaacacagaaaatcccaccgagaggagcagcttcttctgcctagagtactttcccagcaagatgctgagaacgggcaacaactttgagtttacctacaactttgaggaggtgcccttccactccagcttcgctcccagtcagaacctcttcaagctggccaacccgctggtggaccagtacttgtaccgcttcgtgagcacaaataacactggcggagtccagttcaacaagaacctggccgggagatacgccaacacctacaaaaactggttcccggggcccatgggccgaacccagggctggaacctgggctccggggtcaaccgcgccagtgtcagcgccctcgccacgaccaataggatggagctcgagggcgcgagttaccaggtgcccccgcagccgaacggcatgaccaacaacctccagggcagcaacacctatgccctggagaacactatgatcttcaacagccagccggcgaacccgggcaccaccgccacgtacctcgagggcaacatgctcatcaccagcgagagcgagacgcagccggtgaaccgcgtggcgtacaacgtcggcgggcagatggccaccaacaaccagagctccaccactgcccccgcgaccggcacgtacaacctccaggaaatcgtgcccggcagcgtgtggatggagagggacgtgtacctccaaggacccatctgggccaagatcccagagacgggggcgcactttcacccctctccggccatgggcggattcggactcaaacacccaccgcccatgatgctcatcaagaacacgcctgtgcccggaaatatcaccagcttctcggacgtgcccgtcagcagcttcatcacccagtacagcaccgggcaggtcaccgtggagatggagtgggagctcaagaaggaaaactccaagaggtggaacccagagatccagtacacaaacaactacaacgacccccagtttgtggactttgccccggacagcaccggggaatacagaaccaccagacctatcggaacccgataccttacccgacccctttaa

SEQ ID NO: 812 - DNA, 2175 bp, Artificial Sequence
  source: /note="Description of Artificial Sequence: Synthetic polynucleotide"
atgtcttttgttgatcaccctccagattggttggaagaagttggtgaaggtcttcgcgagtttttgggccttgaagcgggcccaccgaaaccaaaacccaatcagcagcatcaagatcaagcccgtggtcttgtgctgcctggttataactatctcggacccggaaacggtctcgatcgaggagagcctgtcaacagggcagacgaggtcgcgcgagagcacgacatctcgtacaacgagcagcttgaggcgggagacaacccctacctcaagtacaaccacgcggacgccgagtttcaggagaagctcgccgacgacacatccttcgggggaaacctcggaaaggcagtctttcaggccaagaaaagggttctcgaaccttttggcctggttgaagagggtgctaagacggcccctaccggaaagcggatagacgaccactttccaaaaagaaagaaggcccggaccgaagaggactccaagccttccacctcgtcagacgccgaagctggacccagcggatcccagcagctgcaaatcccagcccaaccagcctcaagtttgggagctgatacaatgtctgcgggaggtggcggcccattgggcgacaataaccaaggtgccgatggagtgggcaatgcctcgggagattggcattgcgattccacgtggatgggggacagagtcgtcaccaagtccacccgaacctgggtgctgcccagctacaacaaccaccagtaccgagagatcaaaagcggctccgtcgacggaagcaacgccaacgcctactttggatacagcaccccctgggggtactttgactttaaccgcttccacagccactggagcccccgagactggcaaagactcatcaacaactactggggcttcagaccccggtccctcagagtcaaaatcttcaacattcaagtcaaagaggtcacggtgcaggactccaccaccaccatcgccaacaacctcacctccaccgtccaagtgtttacggacgacgactaccagctgccctacgtcgtcggcaacgggaccgagggatgcctgccggccttccctccgcaggtctttacgctgccgcagtacggttacgcgacgctgaaccgcgacaacacagaaaatcccaccgagaggagcagcttcttctgcctagagtactttcccagcaagatgctgagaacgggcaacaactttgagtttacctacaactttgaggaggtgcccttccactccagcttcgctcccagtcagaacctcttcaagctggccaacccgctggtggaccagtacttgtaccgcttcgtgagcacaaataacactggcggagtccagttcaacaagaacctggccgggagatacgccaacacctacaaaaactggttcccggggcccatgggccgaacccagggctggaacctgggctccggggtcaaccgcgccagtgtcagcgccttcgccacgaccaataggatggagctcgagggcgcgagttaccaggtgcccccgcagccgaacggcatgaccaacaacctccagggcagcaacacctatgccctggagaacactatgatcttcaacagccagccggcgaacccgggcaccaccgccacgtacctcgagggcaacatgctcatcaccagcgagagcgagacgcagccggtgaaccgcgtggcgtacaacgtcggcgggcagatggccaccaacaaccagagctccaccactgcccccgcgaccggcacgtacaacctccaggaaatcgtgcccggcagcgtgtggatggagagggacgtgtacctccaaggacccatctgagccaagatcccagagacgggggcgcactttcacccctctccggccatgggcggattcggactcaaacacccaccgcccatgatgctcatcaagaacacgcctgtgcccggaaatatcaccagcttctcggacgtgcccgtcagcagcttcatcacccagtacagcaccgggcaggtcaccgtggagatggagtgggagctcaagaaggaaaactccaagaggtggaacccagagatccagtacacaaacaactacaacgacccccagtttgtggactttgccccggacagcaccggggaatgcagaaccaccagacctatcggaacccgataccttacccgacccctttaa

SEQ ID NO: 813 - DNA, 2175 bp, Artificial Sequence
  source: /note="Description of Artificial Sequence: Synthetic polynucleotide"
atgtcttttgttgatcaccctccagattggttggaagaagttggtgaaggtcttcgcgagtttttgggccttgaagcgggcccaccgaaaccaaaacccaatcagcagcatcaagatcaagcccgtggtcttgtgctgcctggttataactatctcggacccggaaacggtctcgatcgaggagagcctgtcaacagggcagacgaggtcgcgcgagagcacgacatctcgtacaacgagcagcttgaggcgggagacaacccctacctcaagtacaaccacgcggacgccgagtttcaggagaagctcgccgacgacacatccttcgggggaaacctcggaaaggcagtctttcaggccaagaaaagggttctcgaaccttttggcctggttgaagagggtgctaagacggcccctaccggaaagcggatagacgaccactttccaaaaagaaagaaggcccggaccgaagaggactccaagccttccacctcgtcagacgccgaagctggacccagcggatcccagcagctgcaaatcccagcccaaccagcctcaagtttgggagctgatacaatgtctgcgggaggtggcggcccattgggcgacaataaccaaggtgccgatggagtgggcaatgcctcgggagattggcattgcgattccacgtggatgggggacagagtcgtcaccaagtccacccgaacctgggtgctgcccagctacaacaaccaccagtaccgagagatcaaaagcggctccgtcgacggaagcaacgccaacgcctactttggatacagcaccccctgggggtactttgactttaaccgcttccacagccactggagcccccgagactggcaaagactcatcaacaactactggggcttcagaccccggtccctcagagtcaaaatcctcaacattcaagtcaaagaggtcacggtgcaggactccaccaccaccatcgccaacaacctcacctccaccgtccaagtgtttacggacgacgactaccagctgccctacgtcgtcggcaacgggaccgagggatgcctgccggccttccctccgcaggtctttacgctgccgcagtacggttacgcgacgctgaaccgcgacaacacagaaaatcccaccgagaggagcagcttcttctgcctagagtactttcccagcaagatgctgagaacgggcaacaactttgagtttacctacaactttgaggaggtgcccttccactccagcttcgctcccagtcagaacctcttcaagctggccaacccgctggtgggccagtacttgtaccgcttcgtgagcacaaataacactggcggagtccagttcaacgagaacctggccgggagatacgccaacacctacaaaaactggttcccggggcccatgggccgaacccagggctggaacctgggctccggggtcaaccgcgccagtgtcagcgccttcgccacgaccaataggatggagctcgagggcgcgagttaccaggtgcccccgcagccgaacggcatgaccaacaacctccagggcagcaacacctatgccctggagaacactatgatcttcaacagccagccggcgaacccgggcaccaccgccacgtacctcgagggcaacatgctcatcaccagcgagagcgagacgcagccggtgaaccgcgtggcgtacaacgtcggcgggcagatggccaccaacaaccagagctccaccactgcccccgcgaccggcacgtacaacctccaggaaatcgtgcccggcagcgtgtggatggagagggacgtgtacctccaaggacccatctgggccaagatcccagagacgggggcgcactttcacccctctccggccatgggcggattcggactcaaacacccaccgcccatgatgctcatcaagaacacgcctgtgcccggaaatatcaccagcttctcggacgtgcccgtcagcagcttcatcacccagtacagcaccgggcaggccaccgtggagatggagtgggagctcaagaaggaaaactccaagaggtggaacccagagatccagtacacaaacaactacaacgacccccagtttgtggactttgccccggacagcaccggggaatacagaaccaccagacctatcggaacccgataccttacccgacccctttaa

SEQ ID NO: 814 - DNA, 2175 bp, Artificial Sequence
  source: /note="Description of Artificial Sequence: Synthetic polynucleotide"
atgtcttttgttgatcaccctccagattggttggaagaagttggtgaaggtcttcgcgagtttttgggccttgaagcgggcccaccgaaaccaaaacccaatcagcagcatcaagatcaagcccgtggtcttgtgctgcctggttataactatctcggacccggaaacggcctcgatcgaggagagcctgtcaacagggcagacgaggtcgcgcgagagcacgacatctcgtacaacgagcagcttgaggcgggagacaacccctacctcaagtacaaccacgcggacgccgagtttcaggagaagctcgccgacgacacatccttcgggggaaacctcggaaaggcagtctttcaggccaagaaaagggttctcgaaccttttggcctggttgaagagggtgctaagacggcccctaccggaaagcggatagacgaccactttccaaaaagaaagaaggcccggaccgaagaggactccaagccttccacctcgtcagacgccgaagctggacccagcggatcccagcagctgcaaatcccagcccaaccagcctcaagtttgggagctgatacaatgtctgcgggaggtggcggcccattgggcgacaataaccaaggtgccgatggagtgggcaatgcctcgggagattggcattgcgattccacgtggatgggggacagagtcgtcaccaagtccacccgaacctgggtgctgcccagctacaacaaccaccagtaccgagagatcaaaagcggctccgtcgacggaagcaacgccaacgcctactttggatacagcaccccctgggggtactttgactttaaccgcttccacagccactggagcccccgagactggcaaagactcatcaacaactactggggcttcagaccccggtccctcagagtcaaaatcttcaacattcaagtcaaagaggtcacggtgcaggactccaccaccatcatcgccaacaacctcacctccaccgtccaagtgtttacggacgacgactaccagctgccctacgtcgtcggcaacgggaccgagggatgcctgccggccttccctccgcaggtctttacgctgccgcagtacggttacgcgacgctgaaccgcgacaacacagaaaatcccaccgagaggagcagcttcttctgcctagagtactttcccagcaagatgctgagaacgggcaacaactttgagtttacctacaactttgaggaggtgcccttccactccagcttcgcccccagtcagaacctcttcaagctggccaacccgctggtggaccagtacttgtaccgcttcgtgagcacaaataacactggcggagtccagttcaacaagaacctggccgggagatacgccaacacctacaaaaactggttcccggggcccatgggccgaacccagggctggaacctgggctccggggtcaaccgcgccagtgtcagcgccttcgccacgaccaataggatggagctcgagggcgcgagttaccaggtgcccccgcagccgaacggcatgaccaacaacctccagggcagcaacacctatgccctggagaacactatgatcttcaacagccagccggcgaacccgggcaccaccgccacgtacctcgagggcaacatgctcatcaccagcgagagcgagacgcagccggtgaaccgcgtggcgtacaacgtcggcgggcagatggccaccaacaaccagagctccaccactgcccccgcgaccggcacgtacaacctccaggaaatcgtgcccggcagcgtgtggatggagagggacgtgtacctccaaggacccatctgggccaagatcccagagacgggggcgcactttcacccctctccggccatgggcggattcggactcaaacacccaccgcccatgatgctcatcaagaacacgcctgtgcccggaaatatcaccagcttctcggacgtgcccgtcagcagcttcatcacccagtacagcaccgggcaggtcaccgtggagatggagtgggagctcaagaaggaaaactccaagaggtggaacccagagatccagtacacaaacaactacaacgacccccagtttgtggactttgccccggacagcaccggggaatacagaaccaccagacctatcggaacccgataccttacccgacccctttaa

SEQ ID NO: 815 - DNA, 2175 bp, Artificial Sequence
  source: /note="Description of Artificial Sequence: Synthetic polynucleotide"
atgtcttttgttgatcaccctccagattggttggaagaagttggtgaaggtcttcgcgagtttttgggccttgaagcgggcccaccgaaaccaaaacccaatcagcagcatcaagatcaagcccgtggtcttgtgctgcctggttataactatctcggacccggaaacggtctcgatcgaggagagcctgtcaacagggcagacgaggtcgcgcgagagcacgacatctcgtacaacgagcagcttgaggcgggagacaacccctacctcaagtacaaccacgcggacgccgagtttcaggagaagctcgccgacgacacatccttcgggggaaacctcggaaaggcagtctttcaggccaagaaaagggttctcgaaccttttggcctggttgaagagggtgctaagacggcccctaccggaaagcggatagacgaccactttccaaaaagaaagaaggcccggaccgaagaggactccaagccttccacctcgtcagacgccgaagctggacccagcggatcccagcagctgcaaatcccagcccaaccagcctcaagtttgggagctgatacaatgtctgcgggaggtggcggcccattgggcgacaataaccaaggtgccgatggagtgggcaatgcctcgggagattggcattgcgattccacgtggatgggggacagagtcgtcaccaagtccacccgaacctgggtgctgcccagctacaacaaccaccagtaccgagagatcaaaagcggctccgtcgacggaagcaacgccaacgcctactttggatacagcaccccctgggggtactttgactttaaccgcttccacagccactggagcccccgagactggcaaagactcatcaacaactactggggcttcagaccccggtccctcagagtcaaaatcttcaacattcaagtcaaagaggtcacggtgcaggactccaccaccaccatcgccaacaacctcacctccaccgtccaagtgtttacggacgacgactaccagctgccctacgtcgtcggcaacgggaccgagggatgcctgccggccttccctccgcaggtctttacgctgccgcagtacggttacgcgacgctgaaccgcgacaacacagaaaatcccaccgagaggagcagcttcttctgcctagagtactttcccagcaagatgctgagaacgggcaacaactttgagtttacctacaactttgaggaggtgcccttccactccagcttcgctcccagtcagaacctcttcaagctggccaacccgctggtggaccagtacttgtaccgcttcgtgagcacaaataacactggcggagtccagttcaacaagaacctggccgggagatacgccaacacctacaaaaactggttcccggggcccatgggccgaacccagggctggaacctgggctccggggtcaaccgcgccagtgtcagcgccttcgccacgaccaataggatggagctcgagggcgcgagttaccaggtgcccccgcagccgaacggcatgaccaacaacctccagggcagcaacacctatgccctggagaacactatgatcttcaacagccagccggcgaacccgggcaccaccgccacgtacctcgagggcaacatgctcatcaccagcgagagcgagacgcagccggtgaaccgcgtggcgtacaacgtcggcgggcagatggccaccaacaaccagagctccaccactgcccccgcgaccggcacgtacaacctccaggaaatcgtgcccggcagcgtgtggatggagagggacgtgtacctccaaggacccatctgggccaagatcccagagacgggggcgcactttcacccctctccggccatgggcggattcggactcaaacacccaccgcccatgatgctcatcaagaacacgcctgtgcccggaaatatcaccagcctctcggacgtgcccgtcagcagcttcatcacccagtacagcaccgggcaggtcaccgtggagatggagtgggagctcaagaaggaaaactccaagaggtggaacccagagatccagtacacaaacaactacaacgacccccagtttgtggactttgccccggacagcaccggggaatacagaaccaccagacctatcggaacccgataccttacccgacccctttaa

SEQ ID NO: 816 - DNA, 2175 bp, Artificial Sequence
  source: /note="Description of Artificial Sequence: Synthetic polynucleotide"
atgtcttttgttgatcaccctccagattggttggaagaagttggtgaaggtcttcgcgagtttttgggccttgaagcgggcccaccgaaaccaaaacccaatcagcagcatcaagatcaagcccgtggtcttgtgctgcctggttataactatctcggacccggaaacggtctcgatcgaggagagcctgccaacagggcagacgaggtcgcgcgagagcacgacatctcgtacaacgagcagcttgaggcgggagacaacccctacctcaagtacaaccacgcgggcgccgagtttcaggagaagctcgccgacgacacatccttcgggggaaacctcggaaaggcagtctttcaggccaagaaaagggttctcgaaccttttggcctggttgaagagggtgctaagacggcccctaccggaaagcggatagacgaccactttccaaaaagaaagaaggcccggaccgaagaggactccaagccttccacctcgtcagacgccgaagctggacccagcggatcccagcagctgcaaatcccagcccaaccagcctcaagtttgggagctgatacaatgtctgcgggaggtggcggcccattgggcgacaataaccaaggtgccgatggagtgggcaatgcctcgggagattggcattgcgattccacgtggatgggggacagagtcgtcaccaagtccacccgaacctgggtgctgcccggctacaacaaccaccagtaccgagagatcaaaagcggctccgtcgacggaagcaacgccaacgcctactttggatacagcaccccctgggggtactttgactttaaccgcttccacagccactggagcccccgagactggcaaagactcatcaacaactactggggcttcagaccccggtccctcagagtcaaaatcttcaacattcaagtcaaagaggtcacggtgcaggactccaccaccaccatcgccaacaacctcacctccaccgtccaagtgtttacggacgacgactaccagctgccctacgtcgtcggcaacgggaccgagggatgcctgccggccttccctccgcaggtctttacgctgccgcagtacggttacgcgacgctgaaccgcgacaacacagaaaatcccaccgagaggagcagcttcttctgcctagagtactttcccagcaagatgctgagaacgggcaacaactttgagtttacctacaactttgaggaggtgcccttccactccagcttcgctcccagtcagaacctcttcaagctggccaacccgctggtggaccagtacttgtaccgcttcgtgagcacaaataatactggcggagtccagttcaacaagaacctggccgggagatacgccaacacctacaaaaactggttcccggggcccatgggccgaacccagggctggaacctgggctccggggtcaaccgcgccagtgtcagcgccttcgccacgaccaataggatggagctcgagggcgcgagttaccaggtgcccccgcagccgaacggcatgaccaacaacctccagggcagcaacacctatgccctggagaacactatgatcttcaacagccagccggcgaacccgggcaccaccgccacgtacctcgagggcaacatgctcatcaccagcgagagcgagacgcagccggtgaaccgcgtggcgtacaacgtcggcgggcagatggccaccaacaaccagagctccaccactgcccccgcgaccggcacgtacaacctccaggaaatcgtgcccggcagcgtgtggatggagagggacgtgtacctccaaggacccatctgggccaagatcccagagacgggggcgcactttcacccctctccggccatgggcggattcggactcaaacacccaccgcccatgatgctcatcaagaacacgcctgtgcccggaaatatcaccagcttctcggacgtgcccgtcagcagcttcatcacccagtacagcaccgggcaggtcaccgtggagatggagtgggagctcaagaaggaaaactccaagaggtggaacccagagatccagtacacaaacaactacaacgacccccagtttgtggactttgccccggacagcaccggggaatacagaaccaccagacctatcggaacccgataccttacccgacccctttaa

SEQ ID NO: 817 - DNA, 2175 bp, Artificial Sequence
  source: /note="Description of Artificial Sequence: Synthetic polynucleotide"
atgtcttttgttgatcaccctccagattggttggaagaagttggtgaaggtcttcgcgagtttttgggccttgaagcgggcccaccgaaaccaaaacccaatcagcagcatcaagatcaagcccgtggtcttgtgctgcctggttataactatctcggacccggaaacggtctcgatcgaggagagcctgtcaacagggcagacgaggtcgcgcgagagcacgacatctcgtacaacgagcagcttgaggcgggagacaacccctacctcaagtacaaccacgcggacgccgagtttcaggagaagctcgccgacgacacatccttcgggggaaacctcggaaaggcagtctttcaggccaagaaaagggttctcgaaccttttggcctggttgaagagggtgctaagacggcccctaccggaaagcggatagacgaccactttccaaaaagaaagaaggcccggaccgaagaggactccaagcctcccacctcgtcagacgccgaagctggacccagcggatcccagcagctgcaaatcccagcccaaccagcctcaagtttgggagctgatacaatgtctgcgggaggtggcggcccattgggcgacaataaccaaggtgccgatggagtgggcaatgcctcgggagattggcattgcgattccacgtggatgggggacagagtcgtcaccaagtccacccgaacctgggtgctgcccagctacaacaaccaccagtaccgagagatcaaaagcggctccgtcgacggaagcaacgccaacgcctactttggatacagcaccccctgggggtactttgactttaaccgcttccacagccactggagcccccgagactggcaaagactcatcaacaactactggggcttcagaccccggtccctcagagtcaaaatcttcaacattcaagtcaaagaggtcacggtgcaggactccgccaccaccatcgccaacaacctcacctccaccgtccaagtgtttacggacgacgactaccagctgccctacgtcgtcggcaacgggaccgagggatgcctgccggccttccctccgcaggtctttacgctgccgcagtacggttacgcgacgctgaaccgcgacaacacagaaaatcccaccgagaggagcagcttcttctgcctagagtactttcccagcaagatgctgagaacgggcaacaactttgagtttacctacaactttgaggaggtgcccttccactccagcttcgctcccagtcagaacctcttcaagctggccaacccgctggtggaccagtacttgtaccgcttcgtgagcacaaataacactggcggagtccagttcaacaagaacctggccgggagatacgccaacacctacaaaaactggttcccggggcccatgggccgaacccagggctggaacctgggctccggggtcaaccgcgccagtgtcagcgccttcgccacgaccaataggatggagctcgagggcgcgagttaccaggtgcccccgcagccgaacggcatgaccaacaacctccagggcagcaacacctatgccctggagaacactatgatcttcaacagccagccggcgaacccgggcaccaccgccacgtacctcgagggcaacatgctcatcaccagcgagagcgagacgcagccggtgaaccgcgtggcgtacaacgtcggcgggcagatggccaccaacaaccagagctccaccactgcccccgcgaccggcacgtacaacctccaggaaatcgtgcccggcagcgtgtggatggagagggacgtgtacctccaaggacccatctgggccaagatcccagagacgggggcgcactttcacccctctccggccatgggcggattcggactcaaacacccaccgcccatgatgctcatcaagaacacgcctgtgcccggaaatatcaccagcttctcggacgtgcccgtcagcagcttcatcacccagtacagcaccgggcaggtcaccgtggagatggagtgggagctcaagaaggaaaactccaagaggtggaacccagagatccagtacacaaacaactacaacgacccccagtttgtggactttgccccggacagcaccggggaatacagaaccaccagacctatcggaacccgataccttacccgacccctttaa

SEQ ID NO: 818 - DNA, 2175 bp, Artificial Sequence
  source: /note="Description of Artificial Sequence: Synthetic polynucleotide"
atgtcttttgttgatcaccctccagattggttggaagaagttggtgaaggtcttcgcgagtttttgggccttgaagcgggcccaccgaaaccaaaacccaatcagcagcatcaagatcaagcccgtggtcttgtgctgcctggttataactatctcggacccggaaacggtctcgatcgaggagagcctgtcaacagggcagacgaggtcgcgcgagagcacgacatctcgtacaacgagcagcttgaggcgggagacaacccctacctcaagtacaaccacgcggacgccgagtttcaggagaagctcgccgacgacacatccttcgggggaaacctcggaaaggcagtctttcaggccaagaaaagggttctcgaaccttttggcctggttgaagagggtgctaagacggcccctaccggaaagcggatagacgaccactttccaaaaagaaagaaggcccggaccgaagaggactccaagccttccacctcgtcagacgccgaagctggacccagcggatcccagcagccgcaaatcccagcccaaccagcctcaagtttgggagctgatacaatgtctgcgggaggtggcggcccattgggcgacaataaccaaggtgccgatggagtgggcaatgcctcgggagattggcattgcgattccacgtggatgggggacagagtcgtcaccaagtccacccgaacctgggtgctgcccagctacaacaaccaccagtaccgagagatcaaaagcggctccgtcgacggaagcaacgccaacgcctactttggatacagcaccccctgggggtactttgactttaaccgcttccacagccactggagcccccgagactggcaaagactcatcaacaactactggggcttcagaccccggtccctcagagtcaaaatcttcaacattcaagtcaaagaggtcacggtgcaggactccaccaccaccatcgccaacaacctcacctccaccgtccaagtgtttacggacgacgactaccagctgccctacgtcgtcggcaacgggaccgagggatgcctgccggccttccctccgcaggtctttacgctgccgcagtacggttacgcgacgctgaaccgcgacaacacagaaaatcccaccgagaggagcagcttcttctgcctagagtactttcccagcaagatgctgagaacgggcaacaactttgagtttacctacaactttgaggaggtgcccttccactccagcttcgctcccagtcagaacctcttcaagctggccaacccgctggtggaccagtacttgtaccgcttcgtgagcacaaataacactggcggagtccagttcaacaagaacctggccgggagatacgccaacacctacaaaaactggttcccggggcccatgggccgaacccagggctggaacctgggctccggggtcaaccgcgccagtgtcagcgccttcgccacgaccaataggatggagctcgagggcgcgagttaccaggtgcccccgcagccgaacggcatgaccaacaacctccagggcagcaacacctatgccctggagaacactatgatcttcaacagccagccggcgaacccgggcaccaccgccacgtacctcgagggcaacatgctcatcaccagcgagagcgagacgcagccggtgaaccgcgtggcgtacaacgtcggcgggcagatggccaccaacaaccagagctccaccactgcccccgcgaccggcacgtacaacctccaggaaatcgtgcccggcagcgtgtggatggagagggacgtgtacctccaaggacccatctgggccaagatcccagagacgggggcgcactttcacccctctccggccatgggcggattcggactcaaacacccaccgcccatgatgctcatcaagaacacgcctgcgcccggaaatatcaccagcttctcggacgtgcccgtcagcagcttcatcacccagtacagcaccgggcaggtcaccgtggagatggagtgggagctcaagaaggaaaactccaagaggtggaacccagagatccagtacacaaacaactacaacgacccccagtttgtggactttgccccggacagcaccggggaatacagaaccaccagacctatcggaacccgataccttacccgacccctttaa

SEQ ID NO: 819 - DNA, 2175 bp, Artificial Sequence
  source: /note="Description of Artificial Sequence: Synthetic polynucleotide"
atgtcttttgttgatcaccctccagattggttggaagaagttggtgaaggtcttcgcgagtttttgggccttgaagcgggcccaccgaaaccaaaacccaatcagcagcatcaagatcaagcccgtggtcttgtgctgcctggttataactatctcggacccggaaacggtctcgatcgaggagagcctgtcaacagggcagacgaggtcgcgcgagagcacgacatctcgtacaacgagcagcttgaggcgggagacaacccctacctcaagtacaaccacgcggacgccgagtttcaggagaagctcgccgacgacacatccttcgggggaaacctcggaaaggcagtctttcaggccaagaaaagggttctcgaaccttttggcctggttgaagagggtgctaagacggcccctaccggaaagcggatagacgaccactttccaaaaagaaagaaggcccggaccgaagaggactccaagcctcccacctcgtcagacgccgaagctggacccagcggatcccagcagctgcaaatcccagcccaaccagcctcaagtttgggagctgatacaatgtctgcgggaggtggcggcccattgggcgacaataaccaaggtgccgatggagtgggcaatgcctcgggagattggcattgcgattccacgtggatgggggacagagtcgtcaccaagtccacccgaacctgggtgctgcccagctacaacaaccaccagtaccgagagatcaaaagcggctccgtcgacggaagcaacgccaacgcctactttggatacagcaccccctgggggtactttgactttaaccgcttccacagccactggagcccccgagactggcaaagactcatcaacaactactggggcttcagaccccggtccctcagagtcaaaatcttcaacattcaagtcaaagaggtcacggtgcaggactccaccaccaccatcgccaacaacctcacctccaccgtccaagtgtttacggacgacgactaccagctgccctacgtcgtcggcaacgggaccgagggatgcctgccggccttccctccgcaggtctttacgctgccgcagtacggttacgcgacgctgaaccgcgacaacacagaaaatcccaccgagaggagcagcttcttctgcctagagtactttcccagcaagatgctgagaacgggcaacaactttgagtttacctacaactttgaggaggtgcccttccactccagcttcgctcccagtcagaacctcttcaagctggccaacccgctggtggaccagtacttgtaccgcttcgtgagcacaaataacactggcggagtccagttcaacaagaacctggccgggagatacgccaacacctacaaaaactggttcccggggcccatgggccgaacccagggctggaacctgggctccggggtcaaccgcgccagtgtcagcgccttcgccacgaccaataggatggagctcgagggcgcgagttaccaggtgcccccgcagccgaacggcatgaccaacaacctccagggcagcaacacctatgccctggagaacactatgatcttcaacagccagccggcgaacccgggcaccaccgccacgtacctcgagggcaacatgctcatcaccagcgagagcgagacgcagccggtgaaccgcgtggcgtacaacgtcggcgggcagatggccaccaacaaccagagctccaccactgcccccgcgaccggcacgtacaacctccaggaaatcgtgcccggcagcgtgtggatggagagggacgtgtacctccaaggacccatctgggccaagatcccagagacgggggcgcactttcacccctctccggccatgggcggattcggactcaaacacccaccgcccatgatgctcatcaagaacacgcctgtgcccggaaatatcaccagcttctcggacgtgcccgtcagcagcttcatcacccagtacagcaccgggcaggtcaccgtggagatggagtgggagctcaagaaggaaaactccaagaggtggaacccagagatccagtacacaaacaactacaacgacccccagtttgtggactttgccccggacagcaccggggaatacagaaccaccagacctatcggaacccgataccttacccgacccctttaa

SEQ ID NO: 820 - DNA, 2175 bp, Artificial Sequence
  source: /note="Description of Artificial Sequence: Synthetic polynucleotide"
atgtcttttgttgatcaccctccagattggttggaagaagttggtgaaggtcttcgcgagtttttgggccttgaagcgggcccaccgaaaccaaaacccaatcagcagcatcaagatcaagcccgtggtcttgtgctgcctggttataactatctcggacccggaaacggtctcgatcgaggagagcctgtcaacagggcagacgaggtcgcgcgagagcacgacatctcgtacaacgagcagcttgaggcgggagacaacccctacctcaagtacaaccacgcggacgccgagtttcaggagaagctcgccgacgacacatccttcgggggaaacctcggaaaggcagtctttcaggccaagaaaagggttctcgaaccttttggcctggttgaagagggtgctaagacggcccctaccggaaagcggatagacgaccactttccaaaaagaaagaaggcccggaccgaagaggactccaagcctcccacctcgtcagacgccgaagctggacccagcggatcccagcagctgcaaatcccagcccaaccagcctcaagtttgggagctgatacaatgtctgcgggaggtggcggcccattgggcgacaataaccaaggtgccgatggagtgggcaatgcctcgggagattggcattgcgattccacgtggatgggggacagagtcgtcaccaagtccacccgaacctgggtgccgcccagctacaacaaccaccagtaccgagagatcaaaagcggctccgtcgacggaagcaacgccaacgcctactttggatacagcaccccctgggggtactttgactttaaccgcttccacagccactggagcccccgagactggcaaagactcatcaacaactactggggcttcagaccccggtccctcagagtcaaaatcttcaacattcaagtcaaagaggtcacggtgcaggactccaccaccaccatcgccaacaacctcacctccaccgtccaagtgtttacggacgacgactaccagctgccctacgtcgtcggcaacgggaccgagggatgcctgccggccttccctccgcaggtctttacgctgccgcagtacggttacgcgacgctgaaccgcgacaacacagaaaatcccaccgagaggagcagcttcttctgcctagagtactttcccagcaagatgctgagaacgggcaacaactttgagtttacctacaactttgaggaggtgcccttccactccagcttcgctcccagtcagaacctcttcaagctggccaacccgctggtggaccagtacttgtaccgcttcgtgagcacaaataacactggcggagtccagttcaacaagaacctggccgggagatacgccaacacctacaaaaactggttcccggggcccatgggccgaacccagggctggaacctgggctccggggtcaaccgcgccagtgtcagcgccttcgccacgaccaataggatggagctcgagggcgcgagttaccaggtgcccccgcagccgaacggcatgaccaacaacctccagggcagcaacacctatgccctggagaacactatgatcttcaacagccagccggcgaacccgggcaccaccgccacgtacctcgagggcaacatgctcatcaccagcgagagcgagacgcagccggtgaaccgcgtggcgtacaacgtcggcgggcagatggccaccaacaaccagagctccaccactgcccccgcgaccggcacgtacaacctccaggaaatcgtgcccggcagcgtgtggatggagagggacgtgtacctccaaggacccatctgggccaagatcccagagacgggggcgcactttcacccctctccggccatgggcggattcggactcaaacacccaccgcccatgatgctcatcaagaacacgcctgtgcccggaaatatcaccagcttctcggacgtgcccgtcagcagcttcatcacccagtacagcaccgggcaggtcgccgtggagatggagtgggagctcaagaaggaaaactccaagaggtggaacccagagatccagtacacaaacaactacaacgacccccagtttgtggactttgccccggacagcaccggggaatacagaaccaccagacctatcggaacccgataccttacccgacccctttaa

SEQ ID NO: 821 - DNA, 2175 bp, Artificial Sequence
  source: /note="Description of Artificial Sequence: Synthetic polynucleotide"
atgtcttttgttgatcaccctccagattggttggaagaagttggtgaaggtcttcgcgagtttttgggccttgaagcgggcccaccgaaaccaaaacccaatcagcagcatcaagatcaagcccgtggtcttgtgctgcctggttataactatctcggacccggaaacggtctcgatcgaggagagcctgtcaacagggcagacgaggtcgcgcgagagcacgacatctcgtacaacgagcagcttgaggcgggagacaacccctacctcaagtacaaccacgcggacgccgagtttcaggagaagctcgccgacgacacatccttcgggggaaacctcggaaaggcagtctttcaggccaagaaaagggttctcgaaccttttggcctggttgaagagggtgctaagacggcccctaccggaaagcggatagacgaccactttccaaaaagaaagaaggcccggaccgaagaggactccaagccttccacctcgtcagacgccgaagctggacccagcggatcccagcagctgcaaatcccagcccaaccagcctcaagtttgggagctgatacaatgtctgcgggaggtggcggcccattgggcgacaataaccaaggtgccgatggagtgggcaatgcctcgggagattggcattgcgattccacgtggatgggggacagagtcgtcaccaagtccacccgaacctgggtgctgcccagctacaacaaccaccagtaccgagagatcaaaagcggctccgtcgacggaagcaacgccaacgcctactttggatacagcaccccctgggggtactttgactttaaccgcttccacagccactggagcccccgagactggcaaagactcatcaacaactactggggcttcagaccccggtccctcagagtcaaaatcttcaacattcaagtcaaagaggtcacggtgcaggactccaccaccaccatcgccaacaacctcacctccaccgtccaagtgtttacggacgacgactaccagctgccctacgtcgtcggcaacgggaccgagggatgcctgccggccttccctccgcaggtctttacgctgccgcagtacggttacgcgacgctgaaccgcgacaacacagaaaatcccaccgagaggagcagcttcttctgcctagagtactttcccagcaagatgctgagaacgggcaacaactttgagtttacctacaactttgaggaggtgcccttccactccagcttcgctcccagtcagaacctcttcaagctggccaacccgctggtggaccagtacttgtaccgcttcgtgagcacaaataacactggcggagtccagttcaacaagaacctggccgggagatacgccaacacctacaaaaactggttcccggggcccatgggccgaacccagggctggaacctgggctccggggtcaaccgcgccagtgtcagcgccttcgccacgaccaataggatggagctcgagggcgcgagttaccaggtgcccccgcagccgaacggcatgaccaacaacctccagggcagcaacacctatgccctggagaacactatgatcttcaacagccagccggcgaacccgggcaccaccgccacgtacctcgagggcaacatgctcatcaccagcgagagcgagacgcagccggtgaaccgcgtggcgtacaacgtcggcgggcagatggccaccaacaaccagagctccaccactgcccccgcgaccggcacgtacaacctccaggaaatcgtgcccggcagcgtgtggatggagagggacgtgtacctccaaggacccatctgggccaagatcccagagacgggggcgcactttcacccctctccggccatgggcggattcggactcaaacacccaccgcccatgatgctcatcaagaacacgcctgcgcccggaaatatcaccagcttctcggacgtgcccgtcagcagcttcatcacccagtacagcaccgggcaggtcaccgtggagatggagtgggagctcaagaaggaaaactccaagaggtggaacccagagatccagtacacaaacaactacaacgacccccagtttgtggactttgccccggacagcaccggggaatacagaaccaccagacctatcggaacccgataccttacccgacccctttaa

SEQ ID NO: 822 - DNA, 2175 bp, Artificial Sequence
  source: /note="Description of Artificial Sequence: Synthetic polynucleotide"
atgtcttttgttgatcaccctccagattggttggaagaagttggtgaaggtcttcgcgagtttttgggccttgaagcgggcccaccgaaaccaaaacccaatcagcagcatcaagatcaagcccgtggtcttgtgctgcctggttataactatctcggacccggaaacggtctcgatcgaggagagcctgtcaacagggcagacgaggtcgcgcgagagcacgacatctcgtacaacgagcagcttgaggcgggagacaacccctacctcaagtacaaccacgcggacgccgagtttcaggagaagctcgccgacgacacatccttcgggggaaacctcggaaaggcagtctttcaggccaagaaaagggttctcgaaccttttggcctggctgaagagggtgctaagacggcccctaccggaaagcggatagacgaccactttccaaaaagaaagaaggcccggaccgaagaggactccaagccttccacctcgtcagacgccgaagctggacccagcggatcccagcagctgcaaatcccagcccaaccagcctcaagtttgggagctgatacaatgtctgcgggaggtggcggcccattgggcgacaataaccaaggtgccgatggagtgggcaatgcctcgggagattggcattgcgattccacgtggatgggggacagagtcgtcaccaagtccacccgaacctgggtgctgcccagctacaacaaccaccagtaccgagagatcaaaagcggctccgtcgacggaagcaacgccaacgcctactttggatacagcaccccctgggggtactttgactttaaccgcttccacagccactggagcccccgagactggcaaagactcatcaacaactactggggcttcagaccccggtccctcagagccaaaatcttcaacattcaagtcaaagaggtcacggtgcaggactccaccaccaccatcgccaacaacctcacctccaccgtccaagtgtttacggacgacgactaccagctgccctacgtcgtcggcaacgggaccgagggatgcctgccggccttccctccgcaggtctttacgctgccgcagtacggttacgcgacgctgaaccgcgacaacacagaaaatcccaccgagaggagcagcttcttctgcctagagtactttcccagcaagatgctgagaacgggcaacaaccttgagtttacctacaactttgaggaggtgcccttccactccagcttcgctcccagtcagaacctcttcaagctggccaacccgctggtggaccagtacttgtaccgcttcgtgagcacaaataacactggcggagtccagttcaacaagaacctggccgggagatacgccaacacctacaaaaactggttcccggggcccatgggccgaacccagggctggaacctgggctccggggtcaaccgcgccagtgtcagcgccttcgccacgaccaataggatggagctcgagggcgcgagttaccaggtgcccccgcagccgaacggcatgaccaacaacctccagggcagcaacacctatgccctggagaacactatgatcttcaacagccagccggcgaacccgggcaccaccgccacgtacctcgagggcaacatgctcatcaccagcgagagcgagacgcagccggtgaaccgcgtggtgcacaacgtcggcgggcagatggccaccaacaaccagagctccaccactgcccccgcgaccggcacgtacaacctccaggaaatcgtgcccggcagcgtgtggatggagagggacgtgtacctccaaggacccatctgggccaagatcccagagacgggggcgcactttcacccctctccggccatgggcggattcggactcaaacacccaccgcccatgatgctcatcaagaacacgcctgtgcccggaaatatcaccagcttctcggacgtgcccgtcagcagcttcatcacccagtacagcaccgggcaggtcaccgtggagatggagtgggagctcaagaaggaaaactccaagaggtggaacccggagatccagtacacaaacaactacaacgacccccagtttgtggactttgccccggacagcaccggggaatacagaaccaccagacctatcggaacccgataccttacccgacccctttaa

SEQ ID NO: 823 - DNA, 2175 bp, Artificial Sequence
  source: /note="Description of Artificial Sequence: Synthetic polynucleotide"
atgtcttttgttgatcaccctccagattggttggaagaagttggtgaaggtcttcgcgagtttttgggccttgaagcgggcccaccgaaaccaaaacccaatcagcagcatcaagatcaagcccgtggtcttgtgctgcctggttataactatctcggacccggaaacggtctcgatcgaggagagcctgtcaacagggcagacgaggtcgcgcgagagcacgacatctcgtacaacgagcagcttgaggcgggagacaacccctacctcaagtacaaccacgcggacgccgagtttcaggagaagctcgccgacgacacatccttcgggggaaacctcggaaaggcagtctttcaggccaagaaaagggttctcgaaccttttggcctggttgaagagggtgctaagacggcccctaccggaaagcggatagacgaccactttccaaaaagaaagaaggcccggaccgaagaggactccaagccttccacctcgtcagacgccgaagctggacccagcggatcccagcagctgcaaatcccagcccaaccagcctcaagtttgggagctgatacaatgtctgcgggaggtggcggcccattgggcgacaataaccaaggtgccgatggagtgggcaatgcctcgggagattggcattgcgattccacgtggatgggggacagagtcgtcaccaagtccacccgaacctgggtgctgcccagctacaacaaccaccagtaccgagagatcaaaagcggctccgtcgacggaggcaacgccaacgcctactttggatacagcaccccctgggggtactttgactttaaccgcttccacagccactggagcccccgggactggcaaagactcatcaacaactactggggcttcagaccccggtccctcagagtcaaaatcttcaacattcaagtcaaagaggtcacggtgcaggactccaccaccaccatcgccaacaacctcacctccaccgtccaagtgtttacggacgacgactaccagctgccctacgtcgtcggcaacgggaccgagggatgcctgccggccttccctccgcaggtctttacgctgccgcagtacggttacgcgacgctgaaccgcgacaacacagaaaatcccaccgagaggagcagcttcttctgcctagagtactttcccagcaagatgctgagaacgggcaacaactttgagtttacctacaactttgaggaggtgcccttccactccagcttcgctcccagtcagaacctcttcaagctggccaacccgctggtggaccagtacttgtaccgcttcgtgagcacaaataacactggcggagtccagttcaacaagaacctggccgggagatacgccaacacctacaaaaactggttcccggggcccatgggccgaacccagggctggaacctgggctccggggtcaaccgcgccagtgtcagcgccttcgccacgaccaataggatggagctcgagggcgcgagttaccaggtgcccccgcagccgaacggcatgaccaacaacctccagggcagcaacacctatgccctggagaacactatgatcttcaacagccagccggcgaacccgggcaccaccgccacgtacctcgagggcaacatgctcatcaccagcgagagcgagacgcagccggtgaaccgcgtggcgtacaacgtcggcgggcagatggccaccaacaaccagagctccaccactgcccccgcgaccggcacgtacaacctccaggaaatcgtgcccggcagcgtgtggatggagagggacgtgtacctccaaggacccatctgggccaagatcccagagacgggggcgcactttcacccctctccggccatgggcggattcggactcaaacacccaccgcccatgatgctcatcaagaacacgcctgcgcccggaaatatcaccagcttctcggacgtgcccgtcagcagcttcatcacccagtacagcaccgggcaggtcaccgtggagatggagtgggagctcaagaagggaaactccaagaggtggaacccagagatccagtacacaaacaactacaacgacccccagtttgtggactttgccccggacagcaccggggaatacagaaccaccagacctatcggaacccgataccttacccgacccctttaa

SEQ ID NO: 824 - DNA, 2175 bp, Artificial Sequence
  source: /note="Description of Artificial Sequence: Synthetic polynucleotide"
atgtcttttgttgatcaccctccagattggttggaagaagttggtgaaggtcttcgcgagtttttgggccttgaagcgggcccaccgaaaccaaaacccaatcagcagcatcaagatcaagcccgtggtcttgtgctgcctggttataactatctcggacccggaaacggtctcgatcgaggagagcctgtcaacagggcagacgaggtcgcgcgagagcacgacatctcgtacaacgagcagcttgaggcgggagacaacccctacctcaagtacaaccacgcggacgccgagtttcaggagaagctcgccgacgacacgtccttcgggggaaacctcggaaaggcagtctttcaggccaagaaaagggttctcgaaccttttggcctggttgaagagggtgctaagacggcccctaccggaaagcggatagacgaccactttccaaaaagaaagaaggcccggaccgaagaggactccaagccttccacctcgtcagacgccgaagctggacccagcggatcccagcagctgcaaatcccagcccaaccagcctcaagtttgggagctgatacaatgtctgcgggaggtggcggcccattgggcgacaataaccaaggtgccgatggagtgggcaatgcctcgggagattggcattgcgattccacgtggatgggggacagagtcgtcaccaagtccacccgaacctgggtgctgcccagctacaacaaccaccagtaccgagagatcaaaagcggctccgtcgacggaagcaacgccaacgcctactttggatacagcaccccctgggggtactttgactttaaccgcttccacagccactggagcccccgagactggcaaagactcatcaacaactactggggcttcagaccccggtccctcagagtcaaaatcttcaacattcaagtcaaagaggtcacggtgcaggactccaccaccaccatcgccaacaacctcacctccaccgtccaagtgtttacggacgacgactaccagctgccctacgtcgtcggcaacgggaccgagggatgcctgccggccttccctccgcaggtctttacgctgccgcagtacggttacgcgacgctgaaccgcgacaacacagaaaatcccaccgagaggagcagcttcttctgcctagagtactttcccagcaagatgctgagaacgggcaacaactttgagtttacctacaactttgaggaggtgcccttccactccagcttcgctcccagtcagaacctcttcaagctggccaacccgctggtggaccagtacttgtaccgcttcgtgagcacaaataacactggcggagtccagttcaacaagaacctggccgggagatacgccaacacctacaaaaactggttcccggggcccatgggccgaacccagggctggaacctgggctccggggtcaaccgcgccagtgtcagcgccttcgccacgaccaataggatggagctcgagggcgcgagttaccaggtgcccccgcagccgaacggcatgaccaacaacctccagggcagcaacacctatgccctggagaacactatgatcttcaacagccagccggcgaacccgggcaccaccgccacgtacctcgagggcaacatgctcatcaccagcgagagcgagacgcagccggtgaaccgcgtggcgtacaacgtcggcgggcagatggccaccaacaaccagagctccaccactgcccccgcgaccggcacgtacaacctccaggaaatcgtgcccggcagcgtgtggatggagagggacgtgtacctccaaggacccatctgggccaagatcccagagacgggggtgcactttcacccctctccggccatgggcggattcggactcaaacacccaccgcccatgatgctcatcaagaacacgcctgtgcccggaaatatcaccagcttctcggacgtgcccgtcagcagcttcatcacccagtacagcaccgggcaggtcaccgtggagatggagtgggagctcaagaaggaaaactccaagaggtggaacccagagatccagtacacaaacaactacaacgacccccagtttgtggactttgccccggacagcaccggggaatacagaaccaccagacctatcggaacccgataccttacccgacccctttaa

SEQ ID NO: 825 - DNA, 2175 bp, Artificial Sequence
  source: /note="Description of Artificial Sequence: Synthetic polynucleotide"
  modified_base (1652)..(1652): a, c, t, or g
atgtcttttgttgatcaccctccagattggttggaagaagttggtgaaggtcttcgcgagtttttgggccttgaagcgggcccaccgaaaccaaaacccaatcagcagcatcaagatcaagcccgtggtcttgtgctgcctggttataactatctcggacccggaaacggtctcgatcgaggagagcctgtcaacagggcagacgaggtcgcgcgagagcacgacatctcgtacaacgagcagcttgaggcgggagacaacccctacctcaagtacaaccacgcggacgccgagtttcaggagaagctcgccgacgacacatccttcgggggaaacctcggaaaggcagtctttcaggccaagaaaagggttctcgaaccttttggcctggttgaagagggtgctaagacggcccctaccggaaagcggatagacgaccactttccaaaaagaaagaaggcccggaccgaggaggactccaagccttccacctcgtcagacgccgaagctggacccagcggatcccagcagctgcaaatcccagcccaaccagcctcaagtttgggagctgatacaatgtctgcgggaggtggcggcccattgggcgacaataaccaaggtgccgatggagtgggcaatgcctcgggagattggcattgcgattccacgtggatgggggacagagtcgtcaccaagtccacccgaacctgggtgctgcccagctacaacaaccaccagtaccgagagatcaaaagcggctccgtcgacggaagcaacgccaacgcctactttggatacagcaccccctgggggtactttgactttaaccgcttccacagccactggagcccccgagactggcaaagactcatcaacaactactggggcttcagaccccggtccctcagagtcaaaatcttcaacattcaagtcaaagaggtcacggtgcaggactccaccaccaccatcgccaacaacctcacctccaccgtccaagtgtttacggacgacgactaccagctgccctacgtcgtcggcaacgggaccgagggatgcctgccggccttccctccgcaggtctttacgctgccgcagtacggttacgcgacgctgaaccgcgacaacacagaaaatcccaccgagaggagcagcttcttctgcctagagtactttcccagcaagatgctgagaacgggcaacaactttgagtttacctacaactttgaggaggtgcccttccactccagcttcgctcccagtcagaacctcttcaagctggccaacccgctggtggaccagtacttgtaccgcttcgtgagcacaaataacactggcggagtccagttcaacaagaacctggccgggagatacgccaacacctacaaaaactggttcccggggcccatgggccgaacccagggctggaacctgggctccggggtcaaccgcgccagtgtcagcgccttcgccacgaccaataggatggagctcgagggcgcgagttaccaggtgcccccgcagccgaacggcatgaccaacaacctccagggcagcaacacctatgccctggagaacactatgatcttcaacagccagccggcgaacccgggcaccaccgccacgtacctcgagggcagcatgctcatcaccancgagagcgagacgcagccggtgaaccgcgtggcgtacaacgtcggcgggcagatggccaccaacaaccagagctccaccactgcccccgcgaccggcacgtacaacctccaggaaatcgtgcccggcagcgtgtggatggagagggacgtgtacctccaaggacccatctgggccaagatcccagagacgggggcgcactttcacccctctccggccatgggcggattcggactcaaacacccaccgcccatgatgctcatcaagaacacgcctgtgcccggaaatatcaccagcttctcggacgtgcccgtcagcagcttcatcacccagtacagcaccgggcaggtcaccgtggagatggagtgggagctcaagaaggaaaactccaagaggtggaacccagagatccagtacacaaacaactacaacgacccccagtttgtggactttgccccggacagcaccggggaatacagaaccaccagacctatcggaacccgataccttacccgacccctttaa

SEQ ID NO: 826 - DNA, 2211 bp, Artificial Sequence
  source: /note="Description of Artificial Sequence: Synthetic polynucleotide"
atggctgctgacggttatcttccagattggctcgaggacaacctttctgaaggcattcgtgagtggtgggctctgaaacctggagtccctcaacccaaagcgaaccaacaacaccaggacaaccgtcggggtcttgtgcttccgggttacaaatacctcggacccggtaacggactcgacaaaggagagccggtcaacgaggcggacgcggcagccctcgaacacgacaaagcttacgaccagcagctcaaggccggtgacaacccgtacctcaagtacaaccacgccgacgccgagtttcaggagcgtcttcaagaagatacgtcttttgggggcaaccttggcagagcagtcttccaggccaaaaagaggatccttgagcctcttggtctggttgaggaagcagctaaaacggctcctggaaagaagaggcctgtagatcagtctcctcaggaaccggactcatcatctggtgttggcaaatcgggcaaacagcctgccagaaaaagactaaatttcggtcagactggcgactcagagtcagtcccagaccctcaacctctcggagaaccaccagcagcccccacaagtttgggatctaatacaatggcttcaggcggtggcgcaccaatggcagacaataacgagggtgccgatggagtgggtaattcctcaggaaattggcattgcgattcccaatggctgggcgacagagtcatcaccaccagcaccagaacctgggccctgcccacttacaacaaccatctctacaagcaaatctccagccaatcaggagcttcaaacgacaaccactactttggctacagcaccccttgggggtattttgactttaacagattccactgccacttctcaccacgtgactggcagcgactcattaacaacaactggggattccggcccaagaaactcagcttcaagctcttcaacatccaagttaaagaggtcacgcagaacgatggcacgacgactattgccaataaccttaccagcacggttcaagtgtttacggactcggagtatcagctcccgtacgtgctcgggtcggcgcaccaaggctgtctcccgccgtttccagcggacgtcttcatggtccctcagtatggatacctcaccctgaacaacggaagtcaagcggtgggacgctcatccttttactgcctggagtacttcccttcgcagatgctaaggactggaaataacttccaattcagctataccttcgaggatgtaccttttcacagcagctacgctcacagccagagtttggatcgcttgatgaatcctcttattgatcagtatctgtactacctgaacagaacgcaaggaacaacctctggaacaaccaaccaatcacggctgctttttagccaggctgggcctcagtctatgtctttgcaggccagaaattggctacctgggccctgctaccggcaacagagactttcaaagactgctaacgacaacaacaacagtaactttccttggacagcggccagcaaatatcatctcaatggccgcgactcgctggtgaatccaggaccagctatggccagtcacaaggacgatgaagaaaaatttttccctatgcacggcaatctaatatttggcaaagaagggacaacggcaagtaacgcagaattagataatgtaatgattacggatgaagaagagattcgtaccaccaatcctgtggcaacagagcagtatggaactgtggcaaataacttgcagagctcaaatacagctcccacgactagaactgtcaatgatcagggggccttacctggcatggtgtggcaagatcgtgacgtgtaccttcaaggacctatctgggcaaagattcctcacacggatggacactttcatccttctcctctgatgggaggctttggactgaaacatccgcctcctcaaatcatgatcaaaaatactccggtaccggcaaatcctccgacgactttcagcccggccaagtttgcttcatttatcactcagtactccactggacaggtcagcgtggaaattgagtgggagctacagaaagaaaacagcaaacgttggaatccagagattcagtacacttccaactacaacaagtctgttaatgtggactttactgtagacactaatggtgtttatagtgaacctcgccctattggaacccggtatctcacacgaaacttgtaa

SEQ ID NO: 827 - DNA, 2205 bp, Artificial Sequence; identical to SEQ ID NO: 95
  source: /note="Description of Artificial Sequence: Synthetic polynucleotide"

SEQ ID NO: 828 - DNA, 2234 bp, Artificial Sequence
  source: /note="Description of Artificial Sequence: Synthetic polynucleotide"
atgtcttttgttgatcaccctccagattggttggaagaagttggtgaaggtcttcgcgagtttttgggccttgaagcgggcccaccgaaaccaaaacccaatcagcagcatcaagatcaagcccgtggtcttgtgctgcctggttataactatctcggacccggaaacggtctcgatcgaggagagcctgtcaacagggcagacgaggtcgcgcgagagcacgacatctcgtacaacgagcagcttgaggcgggagacaacccctacctcaagtacaaccacgcggacgccgagtttcaggagaagctcgccgacgacacatccttcgggggaaacctcggaaaggcagtctttcaggccaagaaaagggttctcgaaccttttggcctggttgaagagggtgctaagacggcccctaccggaaagcggatagacgaccactttccaaaaagaaagaaggctcggaccgaagaggactccaagccttccacctcgtcagacgccgaagctggacccagcggatcccagcagctgcaaatcccagcccaaccagcctcaagtttgggagctgatacaatgtctgcgggaggtggcggcccattgggcgacaataaccaaggtgccgatggagtgggcaatgcctcgggagattggcattgcgattccacgtggatgggggacagagtcgtcaccaagtccacccgaacctgggtgctgcccagctacaacaaccaccagtaccgagagatcaaaagcggctccgtcgacggaagcaacgccaacgcctactttggatacagcaccccctgggggtactttgactttaaccgcttccacagccactggagcccccgagactggcaaagactcatcaacaactactggggcttcagaccccggtccctcagagtcaaaatcttcaacattcaagtcaaagaggtcacggtgcaggactccaccaccaccatcgccaacaacctcacctccaccgtccaagtgtttacggacgacgactaccagctgccctacgtcgtcggcaacgggaccgagggatgcctgccggccttccctccgcaggtctttacgctgccgcagtacggttacgcgacgctgaaccgcgacaacacagaaaatcccaccgagaggagcagcttcttctgcctagagtactttcccagcaagatgctgagaacgggcaacaactttgagtttacctacaactttgaggaggtgcccttccactccagcttcgctcccagtcagaacctgttcaagctggccaacccgctggtggaccagtacttgtaccgcttcgtgagcacaaataacactggcggagtccagttcaacaagaacctggccgggagatacgccaacacctacaaaaactggttcccggggcccatgggccgaacccagggctggaacctgggctccggggtcaaccgcgccagtgtcagcgccttcgccacgaccaataggatggagctcgagggcgcgagttaccaggtgcccccgcagccgaacggcatgaccaacaacctccagggcagcaacacctatgccctggagaacactatgatcttcaacagccagccggcgaacccgggcaccaccgccacgtacctcgagggcaacatgctcatcaccagcgagagcgagacgcagccggtgaaccgcgtggcgtacaacgtcggcgggcagatggccaccaacaaccagagctccaccactgcccccgcgaccggcacgtacaacctccaggaaatcgtgcccggcagcgtgtggatggagagggacgtgtacctccaaggacccatctgggccaagatcccagagacgggggcgcactttcacccctctccggccatgggcggattcggactcaaacacccaccgcccatgatgctcatcaagaacacgcctgtgcccggaaatatcaccagcttctcggacgtgcccgtcagcagcttcatcacccagtacagcaccgggcaggtcaccgtggagatggagtgggagctcaagaaggaaaactccaagaggtggaacccagagatccagtacacaaacaactacaacgacccccagtttgtggactttgccccggacagcaccggggaatacagaaccaccagacctatcggaacccgataccttacccgacccctttaacccattcatgtcgcataccctcaataaaccgtgtattcgtgtcagtaaaatactgcctc

SEQ ID NO: 829 - protein, 736 aa, Artificial Sequence
  source: /note="Description of Artificial Sequence: Synthetic polypeptide"
MAADGYLPDWLEDNLSEGIREWWALKPGVPQPKANQQHQDNRRGLVLPGYKYLGPGNGLDKGEPVNEADAAALEHDKAYDQQLKAGDNPYLKYNHADAEFQERLQEDTSFGGNLGRAVFQAKKRILEPLGLVEEAAKTAPGKKRPVDQSPQEPDSSSGVGKSGKQPARKRLNFGQTGDSESVPDPQPLGEPPAAPTSLGSNTMASGGGAPMADNNEGADGVGNSSGNWHCDSQWLGDRVITTSTRTWALPTYNNHLYKQISSQSGASNDNHYFGYSTPWGYFDFNRFHCHFSPRDWQRLINNNWGFRPKKLSFKLFNIQVKEVTQNDGTTTIANNLTSTVQVFTDSEYQLPYVLGSAHQGCLPPFPADVFMVPQYGYLTLNNGSQAVGRSSFYCPEYFPSQMLRTGNNFQFSYTFEDVPFHSSYAHSQSLDRLMNPLIDQYLYYLNRTQGTTSGTTNQSRLLFSQAGPQSMSLQARNWLPGPCYRQQRLSKTANDNNNSNFPWTAASKYHLNGRDSLVNPGPAMASHKDDEEKFFPMHGNLIFGKEGTTASNAELDNVMITDEEEIRTTNPVATEQYGTVANNLQSSNTAPTTRTVNDQGALPGMVWQDRDVYLQGPIWAKIPHTDGHFHPSPLMGGFGLKHPPPQIMIKNTPVPANPPTTFSPAKFASFITQYSTGQVSVEIEWELQKENSKRWNPEIQYTSNYNKSVNVDFTVDTNGVYSEPHPIGTRYLTRNL

SEQ ID NO: 830 - protein, 736 aa, Artificial Sequence
  source: /note="Description of Artificial Sequence: Synthetic polypeptide"
MAADGYLPDWLEDNLSEGIREWWALKPGVPQPKANQQHQDNRRGLVLPGYKYLGPGNGLDKGEPVNEADAAALEHDKAYDQQLKAGDNPYLKYNHADAEFQERLQEDTSFGGNLGRAVFQAKKRILEPLGLVEEAAKTAPGKKRPVDQSPQEPDSSSGVGKSGKQPARKRLNFGQTGDSESVPDPQPLGEPPAAPTSLGSNTMASGGGAPMADNNEGADGVGNSSGNWHCDSQWLGDRVITTSTRTWALPTYNNHLYKQISSQSGASNDNHYFGYSTPWGYFDFNRFHCHFSPRDWQRLINNNWGFRPKKLSFKLFNIQVKEVTQNDGTTTVANNLTSTVQVFTDSEYQLPYVLGSAHQGCLPPFPADVFMVPQYGYLTLNNGSQAVGRSSFYCLEYFPSQMLRTGNNFQFSYTFEDVPFHSSYAHSQSLDRLMNPLIDQYLYYLNRTQGTTSGTTNQSRLLFSQAGPQSMSLQARNWLPGPCYRQQRLSKTANDNNNSNFPWTAASKYHLNGRDSLVNPGPAMASHKDDEEKFFPMHGNLIFGKEGTTASNAELDNVMITDEEEIRTTNPVATEQYGTVANNLQSSNTAPTTRTVNDQGALPGMVWQDRDVYLQGPIWAKIPHTDGHFHPSPLMGGFGLKHPPPQIMIKNTPVPANPPTTFSPAKFASFITQYSTGQVSVEIEWELQKENSKRWNPEIQYTSNYNKSVNVDFTVDTNGVYSEPRPIGTRYLTRNL

SEQ ID NO: 831 - protein, 736 aa, Artificial Sequence
  source: /note="Description of Artificial Sequence: Synthetic polypeptide"
MAADGYLPDWLEDNLSEGIREWWALKPGVPQPKANQQHQDNRRGLVLPGYKYLGPGNGLDKGEPVNEADAAALEHDKAYDQQLKAGDNPYLKYNHADAEFQERLQEDTSFGGNLGRAVFQAKKRILEPLGLVEEAAKTAPGKKRPVDQSPQEPDSSSGVGKSGKQPARKRLNFGQTGDSESVPDPQPLGEPPAAPTSLGSNTMASGGGAPMADNNEGADGVGNSSGNWHCDSQWLGDRVITTSTRTWALPTYNNHLYKQISGQSGASNDNHYFGYSTPWGYFDFNRFHCHFSPRDWQRLINNNWGFRPKKLSFKLFNIQVKEVTQNDGTTTIANNLTSTVQVFTDSEYQLPYVLGSAHQGCLPPFPADVFMVPQYGYLTLNNGSQAVGRSSFYCLEYFPSQMLRTGNNFQFSYTFEDVPFHSSYAHSQSLDRLMNPLIDQYLYYLNRTQGTTSGTTNQSRLLFSQAGPQSMSLQARNWLPGPCYRQQRLSKTANGNNNSNFPWTAASKYHLNGRDSLVNPGPAMASHKDDEEKFFPMHGNLIFGKEGTTASNAELDNVMITDEEEIRTTNPVATEQCGTVANNLQSSNTAPTTRTVNDQGALPGMVWQDRDVYLQGPIWAKIPHTDGHFHPSPLMGGFGLKHPPPQIMIKNTPVPANPPTTFSPAKFASFITQYSTGQVSVEIEWELQKENSKRWNPEIQYTSNYNKSVNVDFTVDTNGVYSEPRPIGTRYLTRNL

SEQ ID NO: 832 - protein, 736 aa, Artificial Sequence
  source: /note="Description of Artificial Sequence: Synthetic polypeptide"
MAADGYLPDWLEDNLSEGIREWWALKPGVPQPKANQQHQDNRRGLVLPGYKYLGPGNGLDKGEPVNEADAAALEHDKAYDQQLKAGDNPYLKYNHADAEFQERLQEDTSFGGNLGRAVFQAKKRILEPLGLVEGAAKTAPGKKRPVDQSPQEPDSSSGVGKSGKQPARKRLNFGQTGDSESVPDPQPLGEPPAAPTSLGSNTMASGGGAPMADNNEGADGVGNSSGNWHCDSQWLGDRVITTSTRTWALPTYNSHLYKQISSQSGASNDNHYFGYSTPWGYFDFNRFHCHFSPRDWQRLINNNWGFRPKKLSFKLFNIQVKEVTQNDGTTTIANNLTSTVQVFTDSEYQLPYVLGSAHQGCLPPFPADAFMVPQYGYLTLNNGSQAVGRSSFYCLEYFPSQMLRTGNNFQFSYTFEDVPFHGSYAHSQSLDRLMNPLIDQYLYYLNRTQGTTSGTTNQSRLLFSQAGPQSMSLQARNWLPGPCYRQQRLSKTANDNNNSNFPWTAASKYHLNGRDSLVNPGPAMASHKDDEEKFFPMHGNLIFGKEGTTASNAELDNVMITDEEEIRTTNPVATEQYGTVANNLQSSNTAPTTRTVNDQGALPGMVWQDRDVYLQGPIWAKIPHTDGHFHPSPLMGGFGLKHPPPQIMIKNTPVPANPPTTFSPAKFASFITQYSTGQVSVEIEWELQKENSKRWNPEIQYTSNYNKSVNVDFTVDTNGVYSEPRPIGTRYLTRNS

SEQ ID NO: 833 - protein, 736 aa, Artificial Sequence
  source: /note="Description of Artificial Sequence: Synthetic polypeptide"
MAADGYLPDWLEDNLSEGIREWWALKPGVPQPKANQQHQDNRRGLVLPGYKYLGPGNGLDKGEPVNEADAAALEHDKAYDQQLKAGDNPYLKYNHADAEFQERLQEDTSFGGNLGRAVFQAKKRILEPLGLVEGAAKTAPGKKRPVDQSPQEPDSSSGVGKSGKQLARKRLNFGQTGDSESVPDPQPLGEPPAAPTSLGSNTMASGGGAPMADNNEGADGVGNSSGNWHCDSQWLGDRVITTSTRTWALPTYNSHLYKQISGQSGASNDNHYFGYSTPWGYFDFNRFHCHFSPRDWQRLINNNWGFRPKKLSFKLFNIQVKEVTQNDGTTTIANNLTSTVQVFTDSEYQLPYVLGSAHQGCLPPFPADVFMVPQYGYLTLNNGSQAVGRSSFYCLEYFPSQMLRTGNNFQFSYTFEDVPFHSSYAHSQSLDRLMNPLIDQYLYYLNRTQGTTSGTTNQSRLLFSQAGPQSMSLQARNWLPGPCYRQQRLSKTANDNNNSNFPWTAASKYHLNGRDSLVNPGPAMASHKDDEEKFFPMHGNLIFGKEGTTASNAELDNVMITDEEEIRTTNPVATEQYGTVANNLQSSNTAPTTRTVNDQGALPGMVWQDRDVYLQGPIWAKIPHTDGHFHPSPLMGGFGLKHPPPQIMIKNTPVPANPPTTFSPAKFASFITQYSTGQVSVEIEWELQKENSKRWNPEIQYTSNYNKSVNVDFTVDTNGVYSEPRPIGTRYLTRNL

SEQ ID NO: 834 - protein, 736 aa, Artificial Sequence
  source: /note="Description of Artificial Sequence: Synthetic polypeptide"
MAADGYLPDWLEDNLSEGIREWWALKPGVPQPKANQQHQDDRRGLVLPGYKYLGPGNGLDKGEPVNEADAAALEHDKAYDQQLKAGDNPCLKYNHADAEFQERLQEDTSFGGNLGRAVFQAKKRILEPLGLVEEAAKTAPGKKRPVDQSPQEPDSSSGVGKSGKQPARKRLNFGQTGDSESVPDPQPLGEPPAAPTSLGSNTMASGGSAPMADNNEGADGVGNSSGNWHCDSQWLGDRVITTSTRTWALPTYNNHLYKQISSQSGASNDNHYFGYSTPWGYFDFNRFHCHFSPRDWQRLINNNWGFRPKKLSFKLFNIQVKEVTQNDGTTTIANNLTSTVQVFTDSEYQLPYVLGSAHQGCLPPFPADVFMVPQYGYLTLNNGSQAVGRSSFYCLEYFPSQMLRTGNNFQFSYTFEDVPFHSSYAHSQSLDRLMDPLIDQYLYYLNRTQGTTSGTTNQSRLLFSQAGPQSMSLQARNWLPGPCYRQQRLSKTANDNNNSNFPWTAASKYHLNGRDSLVNPGPAMASHKDDEEKFFPMHGNLIFGKEGTTASNAELDNVMITDEEEIRTTNPVATEQYGTVANNLQSSNTAPTTRTVNDQGALPGMVWQDRDVYLQGPIWAKIPHTDGHFHPSPLMGGFGLKHPPPQIMIKNTPVPANPPTTFSPAKFASFITQYSTGQVSVEIEWELQKENSKRWNPEIQYTSNYNKSVNVDFTVDTNGVYSEPRPIGTRYLTRNL

SEQ ID NO: 835 - protein, 736 aa, Artificial Sequence
  source: /note="Description of Artificial Sequence: Synthetic polypeptide"
MAADGYLPDWLEDNLSEGIREWWALKPGVPQPKANQQHQDDRRGLVLPGYKYLGPGNGLDKGEPVNEADAAALEHDKAYDQQLKAGDNPYLKYNHADAEFQERLQEDTSFGGNLGRAVFQAKKRILEPLGLVEEAAKTAPGKKRPVDQSPQEPDSSSGVGKSGKQPARKRLNFGQTGDSESVPDPQPLGEPPAAPTSLGSNTMASGGGAPMADNNEGADGVGNSSGNWHCDSQWLGNRVITTSTRTWALPTYNNHLYKQISSQSGASNDNHYFGYSTPWGYFDFNRFHCHFSPRDWQRLINNNWGFRPKKLSFKLFNIQVKEVTQNDGTTTIANNLTSTVQVFTDSEYQLPYVLGSAHQGCLPPFPADVFMVPQYGYLTLNNGSQAVGRSSFYCLEYFPSQMLRTGNNFQFSYTFEDVPFHSSYAHSQSLDRLMNPLIDQYLYYLNRTQGTTSGTTNQSRLLFSQAGPQSMSLQARNWLPGPCYRQQRLSKTANDNNNSNFPWTAASKYHLNGRDSLVNPGPAMASHKDDEEKFFPMHGNLIFGKEGTTASNAELDNVMITDEEEIRTTNPVATEQYGTVANNLQSSNTAPTTRTVNDQGALPGMVWQDRDVYLQGPIWAKIPHTDGHFHPSPLMGGFGLKHPPPQIMIKNTPVPANPPTTFSPAKFASFITQYSTGQVSVEIEWELQKENSKRWNPEIQYTSNYNKSVNVDFTVDTNGVYSEPRPIGTRYLTRNL

SEQ ID NO: 836 - protein, 736 aa, Artificial Sequence
  source: /note="Description of Artificial Sequence: Synthetic polypeptide"
MAADGYLPDWLEDNLSEGIREWWALKPGVPQPKANQQHQDDRRGLVLPGYKYLGPGNGLDKGEPVNEADAAALEHDKAYDQQLKAGDNPYLKYNHADAEFQERLQEDTSFGGNLGRAVFQAKKRILEPLGLVEEAAKTAPGKKRPVDQSPQEPDSSSGVGKSGKQPARKRLNFGQTGDSESVPDPQPLGEPPAAPTSLGSNTMASGGGAPMADNNEGADGVGNSSGNWHCDSQWLGDRVITTSTRTWALPTYNNHLYKQISSQSGASNDNHYFGYSTPWGYFDFNRFHCHFSPRDWQRLINNNWGFRPKKLSFKLFNIQVKEVTQNDGTTTIANNLTSTVQVFTDSEYQLPYVLGSAHQGCLPPFPADVFMVPQYGYLTLNNGSQAVGRSSFYCLEYFPSQMLRTGNNFQFSYTFEDVPFHSSYAHSQSLDRLMNPLIDQYLYYLNRTQGTTSGTTNQSRLLFSQAGPQSMSLQARNWLPGPCYRQQRLSKTANDNNNSNFPWTAASKYHLNGRDSLVNPGPAMASHKDDEEKFFPMHGNLIFGKEGTTASNAELDNVMITDEEEIRTTNPVATVQYGTVANNLQSSNTAPTTRTVNDQGALPGMVWQDRDVYLQGPIWAKIPHTDGHFHPSPLMGGFGLKHPPPQIMIKNTPVPANPPTTFSPAKFASFITQYSTGQVSVEIEWELQKENSKRWNPEIQYTSNYNKSVNVDFTVDTNGVYSEPRPIGTRYLTRNL

SEQ ID NO: 837 - protein, 735 aa, Artificial Sequence
  source: /note="Description of Artificial Sequence: Synthetic polypeptide"
MAADGYLPDWLEDNLSEGIREWWALKPGVPQPKANQQHQDNRRGLVLPGYKYLGPGNGLDKGEPVNEADAAALEHDKAYDQQLKAGDNPYLKYNHADAEFQERLQEDTSFGGNLGRAVFQAKKGILEPLGLVEEAAKTAPGKKRPVDQSPQEPDSSSGVGKSGKQPARKRLNFGQTGDSESVPDPQPLGEPPAAPTSLGSNTMASGGGAPMADNNEGADGVGNSSGNWHCDSQWLGDRVITTSTRTWALPTYNNHLYKQISSQSGASNDNHYFGYSTPWGYFDFNRFHCHFSPRDWQRLINNNWGFRPKKLSFKLFNIQVKEVTQNDGTTTIANNLTSTVQVFTDSEYQLPYVFGSAHQGCLPPFPADVFMVPQYGYLTLNNGSQAVGRSSFYCLEYFPSQMLRTGNNFQFSYTFEDVPFHSSYAHSQSSDRLMNPLIDQYLYYLNRTQGTTSGTTNQSRLLFSQAGPQSMSLQARNWLPGPCYRQQRLSKTANDNNNSNFPTAASKYHLNGRDSLVNPGPAMASHKDDEEKFFPMHGNLIFGKEGTTASNAELDNVMITDEEEIRTTNPVATEQYGTVANNLQSSNTAPTTRTVNDQGALPGMVWQDRDVYLQGPIWAKIPHTDGHFHPSPLMGGFGLKHPPPQIMIKNTPVPANPPTTFSPAKFASFITQYSTGQVSVEIEWELQKENSKRWNPEIQYTSNYNKSVNVDFTVDTNGVYSEPRPIGTRYLTRNL

SEQ ID NO: 838 - protein, 736 aa, Artificial Sequence
  source: /note="Description of Artificial Sequence: Synthetic polypeptide"
MAADGYLPDWLEDNLSEGIREWWALKPGVPQPKANQQHQDNRRGLVLPGYKYLGPGNGLDEGEPVNEADAAALEHDKAYDQQLKAGDNPYLKYNHADAEFQERLQEDTSFGGNLGRAVFQAKKRILEPLGLVEGAAKTAPGKKRPVDQSPQEPDSSSGVGKSGKQPARKRLNFGQTGDSESVPDPQPLGEPPAAPTSLGSNTMASGGGAPMADNNEGADGVGNSSGNWHCDSQWLGDRVITTSTRTWALPTYNSHLYKQISSQSGASNDNHYFGYSTPWGYFDFNRFHCHFSPRDWQRLINNNWGFRPKKLSFKLFNIQVKEVTQNDGTTTIANNLTSTVQVFTDSEYQLPYVLGSAHQGCLPPFPADVFMVPQYGYLTLNNGSQAVGRSSFYCLEYFPSQMLRTGNNFQFSYTFEDVPFHSSYAHSQSLDRLMNPLIDQYLYYLNRTQGTTSGTTNQSRLLFSQAGPQSMSLQARNWLPGPCYRQQRLSKTANDNNNSNFPWTAASKYHLNGRDSLVNPGPAMASHKDDEEKFFPMHGNLIFGKEGTTASNAELDNVMITDEEEIRTTNPVATEQYGTVANNLQSSNTAPTTRTVNDQGALPGMVWQDRDVYLQGPIWAKIPHTDGHFHPSPLMGGFGLKHPPPQIMIKNTPVPANPPTTFSPAKFASFITQYSTGQVSVEIEWELQKENSKRWNPEIQYTSNYNKSVNVDFTVDTNGVYSEPRPIGTRYLTRNL

SEQ ID NO: 839 - protein, 668 aa, Artificial Sequence
  source: /note="Description of Artificial Sequence: Synthetic polypeptide"
MAADGYLPDWLEDNLSEGIREWWALKPGVPQPKANQQHQDNRRGLVLPGYKYLGPGNGLDKGEPVNEADAAALEHDKAYDQQLKAGDNPYLKYNHADAEFQERLQEDTSFGGNLGRAVFQAKKRILEPLGLVEGAAKTAPGKKRPVDQSPQEPDSSSGVGKSGKQPARKRLNFGQTGDSESVPDPQPLGEPPAAPTSLGSNTMASGGGAPMADNNEGADGVGNSSGNWHCDSQWLGDRVITTSTRTWALPTYNSHLYKQISSQSGASNDNHYFGYSTPWGILTLTDSTATSHHVTGSDSLTTTGDSGPRNSASSSSTSKLKRSRRTMARRLLPITLPARFKCLRTRSISSRTCSGRRTKAVSRRFQRTPSWSLSMDTSPTTEVKRWDAHPFTAWSTSLRRCGLEITSNSAIPSRMYLFTAATLTARVWIAILLLISICTTTERKEQPLEQPTNHGCFLARLGLSLCLCRPEIGYLGPATGNRDFQRLLTTTTTVTFLGQRPANIISMAATRWIQDQLWPVTRTMKKNFSLCTAIRGPYLAWCGKIVTCTFKDLSGQRFLTRMDTFILLLWEALDNIRLLKSSKILRYRQILRRLSARPSLLHLSLSTPLDRSAWKLSGSYRKKTANVGIQRFSTLPTTTSLLMWTLLTLMVFIVNLALLEPGISHETC

SEQ ID NO: 840 - protein, 734 aa, Artificial Sequence
  source: /note="Description of Artificial Sequence: Synthetic polypeptide"
MTDGYLPDWLEDNLSEGVREWWALQPGAPKPKANQQHQDNARGLVLPGYKYLGPGNGLDKGEPVNAADAAALEHDKAYDQQLKAGDNPYLKYNHADAEFQQRLQGDTSFGGNLGRAVFQAKKRVLEPLGLVEQAGETAPGKKRPLIESPQQPDSSTGIGKKGKQPAKKKLVFEDETGAGDGPPEGSTSGAMSDDSEMRAATGGAAVEGGQGADGVGNASGDWHCDSTWSEGHVTTTSTRTWVLPTYNNHLYKRLGESLQSNTYNGFSTPWGYFDFNRFHCHFSPRDWQRLINNNWGMRPKAMRVKIFNIQVKEVTTSNGETTVANNLTSTVQIFADSSYELPYVMDAGQEGSLPPFPNDVFMVPQYGYCGLVTGNTSQQQTDRNAFYCLEYFPSQMLRTGNNFEITYSFEKVPFHSMYAHSQSLDRLMNPLIDQYLWGLQSTTTGTTLNAGTATTNFTKLRPTNLSNFKKNWLPGPSIKQQGFSKTANQNYKIPATGSDSLIKYETHSTLDGRWSALTPGPPMATAGPADSKFSNSQLIFAGPKQNGNTATVPGTLIFTSEEELAATNATDTDMWGNLPGGDQSNSNLPTVDRLTALGAVPGMVWQNRDIYYQGPIWAKIPHTDGHFHPSPLIGGFGLKHPPPQIFIKNTPVPANPATTFSSTPVNSFITQYSTGQVSVQIDWEIQKERSKRWNPEVQFTSNYGQQNSLLWAPDAAGKYTEPRAIGTRYLTHHL

SEQ ID NO: 841 - protein, 734 aa, Artificial Sequence
  source: /note="Description of Artificial Sequence: Synthetic polypeptide"
MTDGYLPDWLEDNLSEGVREWWALQPGAPKPKANQQHQDNARGLVLPGYKYLGPGNGLDKGEPVNAADAAALEHDKAYDQQLKAGDNPYLKYNHADAEFQQRLQGDTSFGGNLGRAVFQAKKRVLEPLGLVEQAGETAPGKKRPLIESPQQPDSSTGIGKKGKQPAKKKLVFEDETGAGDGPPEGSTSGAMSDDSEMRAAAGGAAVEGGQGADGVGNASGDWHCDSTWSEGHVTTTSTRTWVLPTYNNHLYKRLGESLQSNTYNGFSTPWGYFDFNRFHCHFLPRDWQRLINNNWGVRPKAMRVKIFNIQVKEVTTSNGETTVANNLTSTVQIFADSSYELPYVMDAGQEGSLPPFPNDVFMVPQYGYCGLVTGDTSQQQTDRNAFYCLEYFPSQMLRTGNNFEITYSFEKVPFHSMYAHSQSLDRLMNPLIDQYLWGLQSTTTGTTLNAGTATTNFTKLRPTNFSNFKKNWLPGPSIKQQGFSKTANQNYKIPATGSDSLIKYETHSTLDGRWSALTPGPPMATAGPADSKFSNSQLIFAGPKQNGNTATVPGTLIFTSEEELAATNATDTDMWGNLPGGDQSNSNLPTVDRLTALGAVPGMVWQNRDIYYQGPIWAKIPHTDGHFHPSPLIGGFGLKHPPPQIFIKNTPVPANPATTFSSTPVNSFITQYSTGQVSVQIDWEIQKERSKRWNPEVQFTSNYGQQNSLLWAPDAAGKYTEPRAIGTRYLTHHL

SEQ ID NO: 842 - protein, 734 aa, Artificial Sequence
  source: /note="Description of Artificial Sequence: Synthetic polypeptide"
MTDGYLPDWLEDNLSEGVREWWALQPGAPKPKANQQHQDNARGLVLPGYKYLGPGNGLDEGEPVNAADAAALEHDKAYDQQLKAGDNPYLKYNHADAEFQQRLQGDTSFGGNLGRAVFQAKKRVLEPLGLVEQAGETAPGKKRPLIESPQQPDSSTGIGKKGKQPAKKKLVFEDETGAGDGPPEGSTSGAMSDDSEMRAAAGGAAVEGGQGADGVGNASGDWHCDSTWSEGHVTTTSTRTWVLPTYNNHLYKRLGESLQSNTYNGFSTPWGYFDFNRFHCHFSPRDWQRLINNNWGMRPKAMRVKIFNIQVKEVTTSNGETTVANNLTSTVQIFADSSYELPYVMDAGQEGSLPPFPNDVFMVPQYGYCGLVTGNTSQQQTDRNAFYCLEYFPSQMLRTGNNFEITYSFEKVPFHSMYAHSQSLDRLMNPLIDQYLWGLQSTTTGTTLNAGTATTNFTKLRPTNFSNFKKNWLPGPSIKQQGFSKTANQNYKIPATGSDSLIKYETHSTLDGRWSALTPGPPMATAGPADSKFSNSQLIFAGPKQNGNTATVPGTLIFTSEEELAATNATDTDMWGNLPGGDQSNSNLPTVDRLTALGAVPGMVWQNRDIYYQGPIWAKIPHTDGHFHPSPLIGGFGLKHPPPQIFIKNTPVPANPATTFSSTPVNSFITQYSTGQVSVQIDWEIQKERSKRWNPEVQFTSNYGQQNSLLWAPDAAGKYTEPRAIGTRYLTHHL

SEQ ID NO: 843 - protein, 734 aa, Artificial Sequence
  source: /note="Description of Artificial Sequence: Synthetic polypeptide"
MTDGYLPDWLEDNLSEGVREWWALQPGAPKPKANQQHQDNARGLVLPGYKYLGPGNGLDKGEPVNAADAAALEHDKAYDQQLKAGDNPYLKYNHADAEFQQRLQGDTSFGGNLGRAVFQAKKRVLEPLGLVEQAGETAPGKKRPLIESPQQPDSSTGIGKKGKQPAKKKLVFEDGTGAGDGPPEGSTSGAMSDDSEMRAAAGGAAVEGGQGADGVGNASGDWHCDSTWSEGHVTTTSTRTWVLPTYNNHLYKRLGESLQSNTYNGFPTPWGYFDFNRFHCHFSPRDWQRLINNNWGMRPKAMRVKIFNIQVKEVTTSNGETTAANNLTSTVQIFADSSYELPYVMDAGQEGSLPPFPNDVFMVPQYGYCGLVTGNTSQQQTDRNAFYCLEYFPSQMLRTGNNFEITYSFEKVPFHSMYAHSQSLDRLMNPLIDQYLWGLQSTTTGTTLNAGTATTNFTKLRPTNFSNFKKNWLPGPSIKQQGFSKTANQNYKIPATGSDSLIKYETHSTLDGRWSALTPGPPMATAGPADSKFSNSQLIFAGPKQNGNTATVPGTLIFTSEEELAATNATDTDMWGNLPGGDQSNSNLPTVDRLTALGAVPGMVWQNRDIYYQGPIWAKIPHTDGHFHPSPLIGGFGLKHPPPQIFIKNTPVPANPATTFSSTPVNSFITQYSTGQVSVQIDWEIQKERSKRWNPEVQFTSNYGQQNSLLWAPDAAGKYTEPRAIGTRYLTHHL

SEQ ID NO: 844 - protein, 734 aa, Artificial Sequence
  source: /note="Description of Artificial Sequence: Synthetic polypeptide"
MTDGYLPDWLEDNLSEGVREWWALQPGAPKPKANQQHQDNARGLVLPGYKYLGPGNGLDKGEPVNAADAAALEHDKAYDQQLKAGDNPYLKYNHADAEFQQRLQGDTSFGGNLGRAVFQAKKRVLEPLGLVEQAGETAPGKKRPLIESPQQPDSSTGIGKKGKQPAKKKLVFEDETGAGDGPPEGSTSGAMSDDSEMRAAAGGAAVEGGQGADGVGNASGDWHCDSTWSEGHVTTTSTRTWVLPTYNNHLYKRLGESLQSNTYNGFSTPWGYFDFNRFHCHFSPRDWQRLINNNWGMRPKAMRVKIFNIQVKEVTTSNGETTVANNLTSTVQIFADSSYELPYVMDAGQEGSLPPFPNDVFMVPQYGYRGLVTGNTSQQQTDRNAFYCLEYFPSQMLRTGNNFEITYSFEKVPFHSMYAHSQSLDRLMNPLIDQYLWGLQSTTTGTTLNAGTATTNFTKLRPTNFSNFKKNWLPGPSIKQQGFSKTANQNYKIPATGSDSLIKYETHSTLDGRWSALTPGPPMATAGPADSKFSNSQLIFAGPKQNGNTATVPGTLIFTSEEELAATNATDTDMWGNLPGGDQSNSNLPTVDRLTALGAVPGMVWQNRDIYYQGPIWAKIPHTDGHFHPSPLIGGFGLKHPPPQIFIKNTPVPANPATTFSSTPVNSFITQYSTGQVSVQIDWEIQKERSKRWNPEVQFTSNYGQQNSLLWAPDAAGKYTEPRAIGTRYLTHHL

SEQ ID NO: 845 - protein, 734 aa, Artificial Sequence
  source: /note="Description of Artificial Sequence: Synthetic polypeptide"
MTDGYLPDWLEDNLSEGVREWWALQPGAPKPKANQQHQDNARGLVLQGYKYLGPGNGLDKGEPVNAADAAALEHDKAYDQQLKAGDNPYLKYNHADAEFQQRLQGDTSFGGNLGRAVFQAKKRVLEPLGLVEQAGETAPGKKRPLIESPQQPDSSTGIGKKGKQPAKKKLVFEDETGAGDGPPEGSTSGAMSDDSEMRAAAGGAAVEGGQGADGVGNASGDWHCDSTRSEGHVTTTSTRTWVLPTYNNHLYKRLGESLQSNTYNGFSTPWGYFDFNRFHCHFSPRDWQRLINNNWGMRPKAMRVKIFNIQVKEVTTSNGETTVANNLTSTVQIFADSSYELPYVMDAGQEGSLPPFPNDVFMVPQYGYCGLVTGNTSQQQTDRNAFYCLEYFPSQMLRTGNNFEITYSFEKVPFHSMYAHSQSLDRLMNPLIDQYLWGLQSTTTGTTLNAGTATTNFTKLRPTNFSNFKKNWLPGPSIKQQGFSKTANQNYKIPATGSDSLIKYETHSTLDGRWSARTPGPPMATAGPADSKFSNSQLIFAGPKQNGNTATVPGTLIFTSEEELAATNATDTDMWGNLPGGDQSNSNLPTVDRLTALGAVPGMVWQNRDIYYQGPIWAKIPHTDGHFHPSPLIGGFGLKHPPPQIFIKNTPVPANPATTFSSTPVNSFITQYSTGQVSVQIDWEIQKERSKRWNPEVQFTSNYGQQNSLLWAPDAAGKYTEPRAIGTRYLTHHL

SEQ ID NO: 846 - protein, 724 aa, Artificial Sequence
  source: /note="Description of Artificial Sequence: Synthetic polypeptide"
MSFVDHPPDWLEEVGEGLREFLGLEAGPPKPKPNQQHQDQARGLVLPGYNYLGPGNGLDRGEPVNRADEVAREHDISYNEQLEAGDNPYLKYNHADAEFQERLADDTSFGGNLGKAVFQAKKRVLEPFGLVEEGAKTAPTGKRIDDHFPKRKKARTEEDSKPSTSSDAEAGPSGSQQLQIPAQPASSLGADTMSAGGGGPLGDNNQGADGVGNASGDWHCDSTWMGDRVVTKSTRTWVLPSYNNHQYREIKSGSVDGSNANAYFGYSTPWGYFDFNRFHSHWSPRDWQRLINNYWGFRPRSLRVKIFNIQVKEVTVQDSTTTIANNLTSTVQVFTDDDYQLPYVVGNGTEGCLPAFPPQVFTLPQYGYATLNRDNTENPTERSSFFCLEYFPSKMLRTGNNFEFTYNFEEVPFHSSFAPSQNLFKLANPLVDQYLYRFVSTNNTGGVQFNKNLAGRYANTYKNWFPGPMGRTQGWNLGSGVNRASVSAFATTNRMELEGASYQVPPQPNGMTNNLQGSNTYALENTMIFNSQPANPGTTATYLEGNMLITSESETQPVNRVAYNVGGQMATNNQSSTTAPATGTYNLQEIVPGSVWMERDVYLQGPIWAKIPETEAHFHPSPAMGGFGLKHPPPMMLIKNTPVPGNITSFSDVPVSSFITQYSTGQVTVEMEWELKKENSKRWNPEIQYTNNYNDPQFVDFAPDSTGEYRTTRPIGTRYLTRPL

SEQ ID NO: 847 - protein, 724 aa, Artificial Sequence
  source: /note="Description of Artificial Sequence: Synthetic polypeptide"
MSFVDHPPDWLEEVGEGLREFLGLEAGPPKPKPNQQHQDQARGLVLPGYNYLGPGNGLDRGEPVNRADEVAREHDISYNEQLEAGDNPYLKYNHADAEFQEKLADDTSSGGNLGKAVFQAKKRVLEPFGLVEEGAKTAPTGKRIDDHFPKRKKARTEEDSKPSTSSDAEAGPSGSQQLQIPAQPASSLGADTMSAGGGGPLGDNNQGADGVGNASGDWHCDSTWMGDRVVTKSTRTWVLPSYNNHQYREIKSGSVDGSNANAYFGYSTPWGYFDFNRFHSHWSPRDWQRLINNYWGFRPRSLRVKIFNIQVKEVTVQDSTTTIANNLTSTVQVFTDDDYQLPYVVGNGTEGCLPAFPPQVFTLPQYGYATLNRDNTENPTERSSFFCLEYFPSKMLRTGNNFEFTYNFEEVPFHSSFAPSQNLFKLANPLVDQYLYRFVSTNNTGGVQFNKNLAGRYANTYKNWFPGPMGRTQGWNLGSGVNRASVSAFATTNRMELEGASYQVPPQPNGMTNNLQGSNTYALENTMIFNSQPANPGTTATYLEGNMLITSESETQPVNRVAYNVGGQMATNNQSSTTAPATGTYNLQEIVPGSVWMERDVYLQGPIWAKIPETGAHFHPSPAMGGFGLKHPPPMMLIKNTPVPGNITSFSDVPVSSFITQYSTGQVTVEMEWELKKENSKRWNPEIQYTNNYNDPQFVDFAPDSTGEYRTTRPIGTRYLTRPL

SEQ ID NO: 848 - protein, 724 aa, Artificial Sequence
  source: /note="Description of Artificial Sequence: Synthetic polypeptide"
MSFVDHPPDWLEEVGEGLREFLGLEAGPPKPKPNQQHQDQARGLVLPGYNYLGPGNGLDRGEPVNRADEVAREHDISYNEQLEAGDNPYLKYNHADAEFQEKLADDTSFGGNLGKAVFQAKKRVLEPFGLVEEGAKTAPTGKRIDDHFPKRKKARTEEDSKPSTSSDAEAGPSGSQQLQIPAQPASSLGADTMSAGGGGPLGDNNQGADGVGNASGDWHCDSTWMGDRVVTKSTRTWVLPSYNNHQYREIKSGSVDGSNANAYFGYSTPWGYFDFNRFHSHWSPRDWQRLINNYWGFRPRSLRVKIFNIQVKEVTVQDSTTTIANNLTSTVQVFTDDDYQLPYVVGNGTEGCLPAFPPQVFTLPQYGYATLNRDNTENPTERSSFFCLEYFPSKMLRTGNNFEFTYNFEEVPFHSSFAPSQNLFKLANPLVDQYLYRFVSTNNTGGVQFNKNLAGRYANTYKNWFPGPMGRTQGWNLGSGVNRASVSAFATTNRMELEGASYQVPPQPNGMTNNLQGSNTYALENTMIFNSQPANPGTTATYLEGNMLITSESETQPVNRVAYNVGGQMATNNQSSTTAPATGTYNLQEIVPGSVWMERDVYLQGPIWAKIPETGAHFHPSPAMGGFGLKHPPPMMLIKSTPVPGNITSFSDVPVSSFITQYSTGQVTVEMEWELKKENSKRWNPEIQYTNNYNDPQFVDFAPDSTGEYRTTRPIGTRYLTRPL

SEQ ID NO: 849 - protein, 724 aa, Artificial Sequence
  source: /note="Description of Artificial Sequence: Synthetic polypeptide"
MSFVDHPPDWLEEVGEGLREFLGPEAGPPKPKPNQQHQDQARGLVLPGYNYLGPGNGLDRGEPVNRADEVAREHDISYNEQLEAGDNPYLKYNHADAEFQEKLADDTSFGGNLGKAVFQAKKRVLEPFGLVEEGAKTAPTGKRIDDHFPKRKKVRTEEDSKPSTSSDAEAGPSGSQQLQIPAQPASSLGADTMSAGGGGPLGDNNQGADGVGNASGDWHCDSTWMGDRVVTKSTRTWVPPSYNNHQYREIKSGSVDGSNANAYFGYSTPWGYFDFNRFHSHWSPRDWQRLINNYWGFRPRSLRVKIFNIQVKEVTVQDSTTTIANNLTSTVQVFTDDDYQLPYVVGNGTEGCLPAFPPQVFTLPQYGYATLNRDNTENPTERSSFFCLEYFPSKMLRTGNNFEFTYNFEEVPFHSSFAPSQNLFKLANPLVDQYLYRFVSTNNTGGVQFNKNLAGRYANTYKNWFPGPMGRTQGWNLGSGVNRASVSAFATTNRMELEGASYQVPPQPNGMTNNLQGSNTYALENTMIFNSQPANPGTTATYLEGNMLITSESETQPVNRVACNVGGQMATNNQSSTTAPATGTYNLQEIVPGSVWMERDVYLQGPIWAKIPETGAHFHPSPAMGGFGLKHPPPMMLIKNTPVPGNITSFSDVPVSSFITQYSTGQVTVEMEWELKKENSKRWNPEIQYTNNYNDPQFVDFAPDSTGEYRTTRPIGTRYLTRPL

SEQ ID NO: 850 - protein, 724 aa, Artificial Sequence
  source: /note="Description of Artificial Sequence: Synthetic polypeptide"
MSFVDHPPDWLEEVGEGLREFLGLEAGPPKPKPNQQHQDQARGLVLPGYNYLGPGNGLDRGEPVNRADEVAREHDISYNEQLEAGDNPYLKYNHADAEFQEKLADDTSFGGNLGKAVFQAKKRVLEPFGLVEEGAKTAPTGKRIDDHFPKRKKARTEEDSKPSTSSDAEAGPSGSQQLQIPAQPASSLGADTMSAGGGGPLGDNNQGADGVGNASGDWHCDSTWMGDRVVTKSTRTWVLPSYNNHQYREIKSGSVDGSNANAYFGYSTPWGYFDFNRFHSHWSPRDWQRLINNYWGFRPRSLRVKIFNIQVKEVTVQDSTTTIANNLTSTVQVFTDDDYQLPYVVGNGTEGCLPAFPPQVFTLPQYGYATLNRDNTENPTERSSFFCLEYFPSKMLRTGNNFEFTYNFEEVPFHSSFAPSQNLFKLANPLVDQYLYRFVSTNNTGGVQFNKNLAGRYANTYKNWFPGPMGRTQGWNLGSGVNRASVSAFATTNRMELEGASYQVPPQPNGMTNNLQGSNTYALENTMIFNSQPANPGTTATYLEGNMLITSESETQPVNRVAYNVGGQMATNNQSSTTAPATGAYNLQEIVPGSVWMERDVYLQGPIWAKIPETGAHFHPSPAMGGFGLKHPPPMMLIKNTPVPGNITSFSDVPVSSFITQYSTGQVTVEMEWELKKENSKRWNPEIQYTNNYNDPQFVDFAPDSTGEYRTTRPIGTRYLTRPL

SEQ ID NO: 851 - protein, 724 aa, Artificial Sequence
  source: /note="Description of Artificial Sequence: Synthetic polypeptide"
MSFVDHPPDWLEEVGEGLREFLGLEAGPPKPKPNQQHQDQARGLVLPGYNYLGPGNGLDRGEPVNRADGVAREHDISYNEQLEAGDNPYLKYNHADAEFQEKLADDTSFGGNLGKAVFQAKKRVLEPFGLVEEGAKTAPTGKRIDDHFPKRKKARTEEDSKPSTSSDAEAGPSGSQQLQIPAQPASSLGADTMSAGGGGPLGDNNQGADGVGNASGDWHCDSTWMGDRVVTKSTRTWVLPSYNNHQYREIKSGSVDGSNANAYFGYSTPWGYFDFNRFHSHWSPRDWQRLINNYWGFRPRSLRVKIFNIQVKEVTVQDSTTTIANNLTSTVQAFTDDDYQLPYVVGNGTEGCLPAFPPQVFTLPQYGYATLNRDNTENPTERSSFFCLEYFPSKMLRTGNNFEFTYNFEEVPFHSSFAPSQNLFKLANPLVDQYLYRFVSTNNTGGVQFNKNLAGRYANTYKNWFPGPMGRTQGWNLGSGVNRASVSAFATTNRMELEGASYQVPPQPNGMTNNLQGSNTYALENTMIFNSQPANPGTTATYLEGNMLITSESETQPVNRVAYNVGGQMATNNQSSTTAPATGTYNLQEIVPGSVWMERDVYLQGPIWAKIPETGAHFHPSPAMGGFGLKHPPPMMLIKNTPVPGNITSFSDVPVSSFITQYSTGQVTVEMEWELKKENSKRWNPEIQYTNNYNDPQFVDFAPDSTGEYRTTRPIGTRYLTRPL

SEQ ID NO: 852 - protein, 723 aa, Artificial Sequence
  source: /note="Description of Artificial Sequence: Synthetic polypeptide"
MSFVDHPPDWLEEVGEGLREFLGLEAGPPKPKPNQQHQDQARGLVLPGYNYLGPGNGLDRGEPVNRADEVAREHDISYNEQLEAGDNPYLKYNHADAEFQEKLADDTSFGGNLGKAVFQAKKRVLEPFGLVEEGAKTAPTGKRIDDHFPKRKKARTEEDSKPSTSSDAEAGPSGSQQLQIPAQPASSLGADTMSAGGGGPLGDNNQGADGVGNASGDWHCDSTWMGDRVVTKSTRTWVLPSYNNHQYREIKSGSVDGSNANAYFGYSTPWGYFDFNRFHSHWSPRDWQRLINNYWGFRPRSLRVKIFNIQVKEVTVQDSTTTIANNLTSTVQVFTDDDYQLPYVVGNGTEGCLPAFPPQVFTLPQYGYATLNRDNTENPTERSSFFCLEYFPSKMLRTGNNFEFTYNFEEVPFHSSFAPSQNLFKLANPLVDQYLYRFVSTNNTGGVQFNKNLAGRYANTYKNWFPGPMGRTQGWNLGSGVNRASVSAFATTNRMELEGASYVPPQPNGMTNNLQGSNTYALENTMIFNSQPANPGTTATYLEGNMLITSESETQPVNRVAYNVGGQMATNNQSSTTAPATGTYNLQEIVPGSVWMEGDVYLQGPIWAKIPETGAHFHPSPAMGGFGLKHPPPMMLIKNTPVPGNITSFSDVPVSSFITQYSTGQVTVEMEWELKKENSKRWNPEIQYTNNYNDPQFVDFAPDSTGEYRTTRPIGTRYLTRPL

SEQ ID NO: 853 - protein, 724 aa, Artificial Sequence
  source: /note="Description of Artificial Sequence: Synthetic polypeptide"
MSFVDHPPDWLEEVGEGLREFLGLEAGPPKPKPNQQHQDQARGLVLPGYNYLGPGNGLDRGEPVNRADEVAREHDISYNEQLEAGDNPYLKYNHADAEFQEKLADDTSFGGNLGKAVFQAKKRVLEPFGLVEEGAKTAPTGKRIDDHFPKRKKVRTEEDSKPSTSSDAEAGPSGSQQLQIPAQPASSLGADTMSAGGGGPLGDNNQGADGVGNASGDWHCDSTWMGDRVVTKSTRTWVLPSYNNHQYREIKSGSVDGSNANAYFGYSTPWGYFDFNRFHSHWSPRDWQRLINNYWGFRPRSLRVKIFNIQVKEVTVQDSTTTIANNLTSTVQVFTDDDYQLPYVVGNGTEGCLPAFPPQVFTLPQYGYATLNRDNTENPTERSSFFCLEYFPSKMLRTGNNFEFTYNFEEVPFHSSFAPSQNLFKLANPLVDQYLYRFVSTNNTGGVQFNKNLAGRYANTYKNWFPGPMGRTQGWNLGSGVNRASVSAFATTNRMELEGASYQVPPQPNGMTNNLQGSNTYALENTMIFNSQPANPGTTATYLEGNMLITSESETQPVNRVAYNVGGQMATNNQSSTTAPATGTYNLQEIVPGSVWMERDVYLQGPIWAKIPETGAHFHPSPAMGGFGLKHPPPMMLIKNTPVPGNITSFSDVPVSSFITQYSTGQVTVEMEWELKKENSERWNPEIQYTNNYNDPQFVDFAPDSTGEYRTTRPIGTRYLTRPL

SEQ ID NO: 854 - protein, 724 aa, Artificial Sequence
  source: /note="Description of Artificial Sequence: Synthetic polypeptide"
MSFVDHPPDWLEEVGEGLREFLGLEAGPPKPKPNQQHQDQARGLVLPGYNYLGPGNGLDRGEPVNRADEVAREHDISYSEQLEAGDNPYLKYNHADAEFQEKLADDTSFGGNLGKAVFQAKKRVLEPFGLVEEGAKTAPTGKRIDDHFPKRKKARTEEDSKPSTSSDAEAGPSGSQQLQIPAQPASSLGADTMSAGGGGPLGDNNQGADGVGNASGDWHCDSTWMGDRVVTKSTRTWVLPSYNNHQYREIKSGSVDGSNANAYFGYSTPWGYFDFNRFHSHWSPRDWQRLINNYWGFRPRSLRVKIFNIQVKEVTVQDSTTTIANNLTSTVQVFTDDDYQLPYVVGNGTEGCLPAFPPQVFTLPQYGYATLNRDNTENPTERSSFFCLEYFPSKMLRTGNNFEFTYNFEEVPFHSSFAPSQNLFKLANPLVDQYLYRFVSTNNTGGVQFNKNLAGRYANTYKNWFPGPMGRTQGWNLGSGVNRASVSAFATTNRMELEGASYQVPPQPNGMTNNLQGSNTYALENTMIFNSQPANPGTTATYLEGNMLITSESETQPVNRVAYNVGGQMATNNQSSTTAPATGTYNLQEIVPGSVWMERDVYLQGPIWAKIPETGAHFHPSPAMGGFGLKHPPPMMLIKNTPVPGNITSFSDVPVSSFITQYSTGQVTVEMEWELKKENSKRWNPEIQYTNNYNDPQFVDFAPDSTGEYRTARPIGTRYLTRPL

SEQ ID NO: 855 - protein, 724 aa, Artificial Sequence
  source: /note="Description of Artificial Sequence: Synthetic polypeptide"
MSFVDHPPDWLEEVGEGLREFLGPEAGPPKPKPNQQHQDQARGLVLPGYNYLGPGNGLDRGEPVNRADEVAREHDISYNEQLEAGDNPYLKYNHADAEFQEKLADDTSFGGNLGKAVFQAKKRVLEPFGLVEEGAKTAPTGKRIDDHFPKRKKARTEEDSKPSTSSDAEAGPSGSQQLQIPAQPASSLGADTMSAGGGGPLGDNNQGADGVGNASGDWHCDSTWMGDRVVTKSTRTWVLPSYNNHQYREIKSGSVDGSNANAYFGYSTPWGYFDFNRFHSHWSPRDWQRLINNYWGFRPRSLRVKIFNIQVKEVTVQDSTTTIANNLTSTVQVFTDDDYQLPYVVGNGTEGCLPAFPPQVFTLPQYGYATLNRDNTENPTERSSFFCLEYFPSKMLRTGNNFEFTYNFEEVPFHSSFAPSQNLFKLANPLVDQYLYRFVSTNNTGGVQFNKNLAGRYANTYKNWFPGPMGRTQGWNLGSGVNRASVSAFATTNRMELEGASYQVPPQPNGMTNNLQGSNTYALENTMIFNSQPANPGTTATYLEGNMLITSESETQPVNRVAYNVGGQMTTNNQSSTTAPATGTYNLQEIVPGSVWMERDVYPQGPIWAKIPETGAHFHPSPAMGGFGLKHPPPMMLIKNTPVPGNITSFSDVPVSSFITQYSTGQVTVEMEWELKKENSKRWNPEIQYTNNYNDPQFVDFAPDSTGEYRTTRPIGTRYLTRPL

SEQ ID NO: 856 - protein, 724 aa, Artificial Sequence
  source: /note="Description of Artificial Sequence: Synthetic polypeptide"
MSFVDHPPDWLEEVGEGLREFLGLEAGPPKPKPNQQHQDQARGLVLPGYNYLGPGNGLDRGEPVNRADEVAREHDISYNEQLEAGDNPYLKYNHADAEFQEKLADDTSFGGNLGKAVFQAKKRVLEPFGLVEEGAKTAPTGKRIDDHFPKRKKARTEEDSKPSTSSDAEAGPSGSQQLQIPAQPASSLGADTMSAGGGGPLGDNNQGADGVGNASGDWHCDSTWMGDRVVTKSTRTWVLPSYNNHQYREIKSGSVDGSNANAYFGYSTPWGYFDFNRFHSHWSPRDWQRLINNYWGFRPRSLRVKIFNIQVKEVTVQDSTTTIANNLTSTVQVFTDDDYQLPYVVGNGTEGCLPAFPPQVFTLPQYGYATLNRDNTENPTERSSFLCLEYFPSKMLRTGNNFEFTYNFEEVPFHSSFAPSQNLFKLANPLVDQYLYRFVSTNNTGGVQFNKNLAGRYANTYKNWFPGPMGRTQGWNLGSGVNRASVSAFATTNRMELEGASYQVPPQPNGMTNNLQGSNTYALENTMIFNSQPANPGTTATYLEGNMLITSESETQPVNRVAYNVGGQMATNNQSSTTAPATGTYNLQEIVPGSVWMKRDVYLQGPIWAKIPETGAHFHPSPAMGGFGLKHPPPMMLIKNTPVPGNITSFSDVPVSSFITQYSTGQVTVEMEWELKKENSKRWNPEIQYTNNYNDPQFVDFAPDSTGEYRTTRPIGTRYLTRPL

SEQ ID NO: 857 - protein, 724 aa, Artificial Sequence
  source: /note="Description of Artificial Sequence: Synthetic polypeptide"
MSFVDHPPDWLEEVGEGLREFLGLEAGPPKPKPNQQHQDQARGLVLPGYNYLGPGNGLDRGEPVNRADEVAREHDISYNEQLEAGDNPYLKYNHADAEFQEKLADDTSFGGNLGKAVFQAKKRVLEPFGLVEEGAKTAPTGKRIDDHFPKRKKARTEEDSKPSTPSDAEAGPSGSQQLQIPAQPASSLGADTMSAGGGGPLGDNNQGADGVGNASGDWHCDSTWMGDRVVTKSTRTWVLPSYNNHQYREIKSGSVDGSNANAYFGYSTPWGYFDFNRFHSHWSPRDWQRLINNYWGFRPRSLRVKIFNIQVKEVTVQDSTTTIANNLTSTVQVFTDDDYQLPYVVGNGTEGCLPAFPPQVFTLPQYGYATLNRDNTENPTERSSFFCLEYFPSKMLRTGNNFEFTYNFEEVPFHSSFAPSQNLFKLANPLVDQYLYRFVSTNNTGGVQFNKNLAGRYANTYKNWFPGPMGRTQGWNLGSGVNRASVSAFATTNRMELEGASYQVPPQPNGMTNNLQGSNTYALENTMIFNSQPANPGTTATYLEGNMLITSESETQPVNRVAYNVGGQMATNNQSSTTAPATGTYNLQEIVPGSVWMERDVYLQGPIWAKIPETGAHFHPSPAMGGFGLKHPPPMMLIKNTPVPGNITSFSDVPVSSFITQYSTGQVTVEMEWELKKENSKRWNPEIQYTNNYNDPQFVDFAPDSTGEYRTTRPIGTRYLTRPL

SEQ ID NO: 858 - protein, 724 aa, Artificial Sequence
  source: /note="Description of Artificial Sequence: Synthetic polypeptide"
MSFVDHPPDWLEEVGEGLREFLGLEAGPPKPKPNQQHQDQARGLVLPGYNYLGPGNGLDRGEPVNRADEVAREHDISYNEQLEAGDNPYLKYNHADAEFQEKLADDTSFGGNLGKAVFQAKKRVLEPFGLVEEGAKTAPTGKRIDDHFPKRKKARTEEDSKPSTSSDAEAGPSGSQQLQIPAQPASSLGADTMSAGGGGPLGDNNQGADGVGNASGDWHCDSTWMGDRVVTKSTRTWVLPSYNNHQYREIKSGSVDGSNANAYFGYSTPWGYFDFNRFHSHWSPRDWQRLINNYWGFRPRSLRVKIFNIQVKEVTVQDSTTTIANNLTSTVQVFTDDDYQLPYVVGNGTEGCLPAFPPQVFTLPQYGYATLNRDNTENPTERSSFFCLEYFPSKMLRTGNNFEFTYNFEEVPFHSSFAPSQNLFKLANPLVDQYLYRFVSTNNTGGVQFNKNLAGRYANTHKNWFPGPMGRTQGWNLGSGVNRASVSAFATTNRMELEGASYQVPPQSNGMTNNLRGSNTYALENTMIFNSQPANPGTTATYLEGNMLITSESETQPVNRVAYNVGGQMATNNQSSTTAPATGTYNLQEIVPGSVWMERDVYLQGPIWAKIPETGAHFHPSPAMGGFGLKHPPPMMLIKNTPVPGNITSFSDVPVSSFITQYSTGQVTVEMEWELKKENSKRWNPEIQYTNNYNDPQFVDFAPDSTGEYRTTRPIGTRYLTRPL

SEQ ID NO: 859 - protein, 724 aa, Artificial Sequence
  source: /note="Description of Artificial Sequence: Synthetic polypeptide"
MSFVDHPPDWLEEVGEGLREFLGLEAGPPKPKPNQQHQDQARGLVLPGYNYLGPGNGLDRGEPVNRADEVAREHDISYNEQLEAGDNPYLKYNHADAEFQEKLADDTSFGGNLGKAVFQAKKRVLEPFGLVEEGAKTAPTGKRIDDHFPKRKKARTEEDSKPSTSSDAEAGPSGSQQLQIPAQPASSLGADTMSAGGGGPLGDNNQGADGVGNASGDWHCDSTWMGDRVVTKSTRTWVLPSYNNHQYREIKSGSVDGSNANAYFGYSTPWGYFDFNRFHSHWSPRDWQRLINNYWGFRPRSLRVKIFNIQVKEVTVQDSTTTIANNLTSTVQVFTDDDYQLPYVVGNGTEGCLPAFPPQVFTLPQYGYATLNRDNTENPTERSSFFCLEYFPSKMLRTGNNFEFTYNFEEVPFHSSFAPSQNLFKLANPLVDQYLYRFVSTNNTGGVQFNKNLAGRYANTYKNWFPGPMGRTQGWNLGSGVNRASVSAFATTNRMELEGASYQVPPQPNGMTNNLQGSNTYALENTMIFNSQPANPGTTATYLEGNMLITSESETQPVNRVAYSVGGQMATNNQSSTTAPTTGTYNLQEIVPGSVWMERDVYLQGPIWAKIPETGAHFHPSPAMGGFRLKHPPPMMLIKNTPVPGNITSFSDVPVSSFITQYSTGQVTVEMEWELKKENSKRWNPEIQYTNNYNDPQFVDFAPDSTGEYRTTRPIGTRYLTRPL

SEQ ID NO: 860 - protein, 724 aa, Artificial Sequence
  source: /note="Description of Artificial Sequence: Synthetic polypeptide"
MSFVDHPPDWLEEVGEGLREFLGLEAGPPKPKPNQQHQDQARGLVLPGYNYLGPGNGLDRGEPVNRADEVAREHDISYNEQLEAGDNPYLKYNHADAEFQEKLADDTSFGGNLGKAVFQAKKRVLEPFGLVEEGAKTAPTGKRIDDHFPKRKKARTEEDSKPSTSSDAEAGPSGSQQLQIPAQPASSLGADTMSAGGGGPLGDNNQGADGVGNASGDWHCDSTWMGDRVVTKSTRTWVLPSYNNHQYREIKSGSVDGSNANAYFGYSTPWGYFDFNRFHSHWSPRDWQRLINNYWGFRPRSLRVKIFNIQVKEVTVQDSTTTIANNLTSTVQVFTDDDYQLPYVVGNGTEGCLPAFPPQVFTLPQYGYATLNRDNTENPTERSSFFCLEYFPSKMLRTGNNFEFTYNFEEVPFHSSFAPSQNLFKLANPLVDQYLYRFVSTNNTGGVQFNKNLAGRYANTYKNWFPGPMGRTQGWNLGSGVNRASVSAFAATNRMELEGASYQVPPQPNGMTNNLQGSNTYALENTMIFNSQPANPGTTATYLEGNMLITSESETQPVNRVAYNVGGQMATNNQSSTTAPATGTYNLQEIVPGGVWMERDVYLQGPIWAKIPETGAHFHPSPAMGGFGLKHPPPMMLIKNTPVPGNTTSFSDVPVSSFITQYSTGQVTVEMEWELKKENSKRWNPEIQYTNNYNDPQFVDFAPDSTGEYRTTRPIGTRYLTRPL

SEQ ID NO: 861 - protein, 724 aa, Artificial Sequence
  source: /note="Description of Artificial Sequence: Synthetic polypeptide"
MSFVDHPPDWLEEVGEGLREFLGLEAGPPKPKPNQQHQDQARGLVLPGYNYLGPGNGLDRGEPVNRADEVAREHDISYNEQLEAGDNPYLKYNHADAEFQEKLADDTSFGGNLGKVVFQAKKRVLEPFGLVEEGAKTAPTGKRIDDHFPKRKKARTEEDSKPSTSSDAEAGPSGSQQLQIPAQPASSLGADTMSAGGGGPLGGNNQGADGVGNASGDWHCDSTWMGDRVVTKSTRTWVLPSYNNHQYREIKSGSVDGSNANAYFGYSTPWGYFDFNRFHSHWGPRDWQRLINNYWGFRPRSLRVKIFNIQVKEVTVQDSTTTIANNLTSTVQVFTDDDYQLPYVVGNGTEGCLPAFPPQVFTLPQYGYATLNRDNTENPTERSSFFCLEYFPSKMLRTGNNFEFTYNFEEVPFHSSFAPSQNLFKLANPLVDQYLYRFVSTNNTGGVQFNKNLAGRYANTYKNWFPGPMGRTQGWNLGSGVNRASVSALATTNRMELEGASYQVPPQPNGMTNNLQGSNTYALENTMIFNSQPANPGTTATYLEGNMLITSESETQPVNRVAYNVGGQMATNNQSSTTAPATGTYNLQEIVPGSVWMERDVYLQGPIWAKIPETGAHFHPSPAMGGFGLKHPPPMMLIKNTPVPGNITSFSDVPVSSFITQYSTGQVTVEMEWELKKENSKRWNPEIQYTNNYNDPQFVDFAPDSTGEYRTTRPIGTRYLTRPL

SEQ ID NO: 862 - protein, 723 aa, Artificial Sequence
  source: /note="Description of Artificial Sequence: Synthetic polypeptide"
MSFVDHPPDWLEEVGEGLREFLGLEAGPPKPKPNQQHQDQARGLVLPGYNYLGPGNGLDRGEPVNRADEVAREHDISYNEQLEAGDNPYLKYNHADAEFQEKLADDTSFGGNLGKAVFQAKKRVLEPFGLVEEGAKTAPTGKRIDDHFPKRKKARTEEDSKPSTSSDAEAGPSGSQQLQIPAQPASSLGADTMSAGGGGPLGDNNQGADGVGNASGDWHCDSTWMGDRVVTKSTRTWVLPSYNNHQYREIKSGSVDGSNANAYFGYSTPWGYFDFNRFHSHWSPRDWQRLINNYWGFRPRSLRVKIFNIQVKEVTVQDSTTTIANNLTSTVQVFTDDDYQLPYVVGNGTEGCLPAFPPQVFTLPQYGYATLNRDNTENPTERSSFFCLEYFPSKMLRTGNNFEFTYNFEEVPFHSSFAPSQNLFKLANPLVDQYLYRFVSTNNTGGVQFNKNLAGRYANTYKNWFPGPMGRTQGWNLGSGVNRASVSAFATTNRMELEGASYQVPPQPNGMTNNLQGSNTYALENTMIFNSQPANPGTTATYLEGNMLITSESETQPVNRVAYNVGGQMATNNQSSTTAPATGTYNLQEIVPGSVWMERDVYLQGPIAKIPETGAHFHPSPAMGGFGLKHPPPMMLIKNTPVPGNITSFSDVPVSSFITQYSTGQVTVEMEWELKKENSKRWNPEIQYTNNYNDPQFVDFAPDSTGECRTTRPIGTRYLTRPL

SEQ ID NO: 863 - protein, 724 aa, Artificial Sequence
  source: /note="Description of Artificial Sequence: Synthetic polypeptide"
MSFVDHPPDWLEEVGEGLREFLGLEAGPPKPKPNQQHQDQARGLVLPGYNYLGPGNGLDRGEPVNRADEVAREHDISYNEQLEAGDNPYLKYNHADAEFQEKLADDTSFGGNLGKAVFQAKKRVLEPFGLVEEGAKTAPTGKRIDDHFPKRKKARTEEDSKPSTSSDAEAGPSGSQQLQIPAQPASSLGADTMSAGGGGPLGDNNQGADGVGNASGDWHCDSTWMGDRVVTKSTRTWVLPSYNNHQYREIKSGSVDGSNANAYFGYSTPWGYFDFNRFHSHWSPRDWQRLINNYWGFRPRSLRVKILNIQVKEVTVQDSTTTIANNLTSTVQVFTDDDYQLPYVVGNGTEGCLPAFPPQVFTLPQYGYATLNRDNTENPTERSSFFCLEYFPSKMLRTGNNFEFTYNFEEVPFHSSFAPSQNLFKLANPLVGQYLYRFVSTNNTGGVQFNENLAGRYANTYKNWFPGPMGRTQGWNLGSGVNRASVSAFATTNRMELEGASYQVPPQPNGMTNNLQGSNTYALENTMIFNSQPANPGTTATYLEGNMLITSESETQPVNRVAYNVGGQMATNNQSSTTAPATGTYNLQEIVPGSVWMERDVYLQGPIWAKIPETGAHFHPSPAMGGFGLKHPPPMMLIKNTPVPGNITSFSDVPVSSFITQYSTGQATVEMEWELKKENSKRWNPEIQYTNNYNDPQFVDFAPDSTGEYRTTRPIGTRYLTRPL

SEQ ID NO: 864 - protein, 724 aa, Artificial Sequence
  source: /note="Description of Artificial Sequence: Synthetic polypeptide"
MSFVDHPPDWLEEVGEGLREFLGLEAGPPKPKPNQQHQDQARGLVLPGYNYLGPGNGLDRGEPVNRADEVAREHDISYNEQLEAGDNPYLKYNHADAEFQEKLADDTSFGGNLGKAVFQAKKRVLEPFGLVEEGAKTAPTGKRIDDHFPKRKKARTEEDSKPSTSSDAEAGPSGSQQLQIPAQPASSLGADTMSAGGGGPLGDNNQGADGVGNASGDWHCDSTWMGDRVVTKSTRTWVLPSYNNHQYREIKSGSVDGSNANAYFGYSTPWGYFDFNRFHSHWSPRDWQRLINNYWGFRPRSLRVKIFNIQVKEVTVQDSTTIIANNLTSTVQVFTDDDYQLPYVVGNGTEGCLPAFPPQVFTLPQYGYATLNRDNTENPTERSSFFCLEYFPSKMLRTGNNFEFTYNFEEVPFHSSFAPSQNLFKLANPLVDQYLYRFVSTNNTGGVQFNKNLAGRYANTYKNWFPGPMGRTQGWNLGSGVNRASVSAFATTNRMELEGASYQVPPQPNGMTNNLQGSNTYALENTMIFNSQPANPGTTATYLEGNMLITSESETQPVNRVAYNVGGQMATNNQSSTTAPATGTYNLQEIVPGSVWMERDVYLQGPIWAKIPETGAHFHPSPAMGGFGLKHPPPMMLIKNTPVPGNITSFSDVPVSSFITQYSTGQVTVEMEWELKKENSKRWNPEIQYTNNYNDPQFVDFAPDSTGEYRTTRPIGTRYLTRPL

SEQ ID NO: 865 - protein, 724 aa, Artificial Sequence
  source: /note="Description of Artificial Sequence: Synthetic polypeptide"
MSFVDHPPDWLEEVGEGLREFLGLEAGPPKPKPNQQHQDQARGLVLPGYNYLGPGNGLDRGEPVNRADEVAREHDISYNEQLEAGDNPYLKYNHADAEFQEKLADDTSFGGNLGKAVFQAKKRVLEPFGLVEEGAKTAPTGKRIDDHFPKRKKARTEEDSKPSTSSDAEAGPSGSQQLQIPAQPASSLGADTMSAGGGGPLGDNNQGADGVGNASGDWHCDSTWMGDRVVTKSTRTWVLPSYNNHQYREIKSGSVDGSNANAYFGYSTPWGYFDFNRFHSHWSPRDWQRLINNYWGFRPRSLRVKIFNIQVKEVTVQDSTTTIANNLTSTVQVFTDDDYQLPYVVGNGTEGCLPAFPPQVFTLPQYGYATLNRDNTENPTERSSFFCLEYFPSKMLRTGNNFEFTYNFEEVPFHSSFAPSQNLFKLANPLVDQYLYRFVSTNNTGGVQFNKNLAGRYANTYKNWFPGPMGRTQGWNLGSGVNRASVSAFATTNRMELEGASYQVPPQPNGMTNNLQGSNTYALENTMIFNSQPANPGTTATYLEGNMLITSESETQPVNRVAYNVGGQMATNNQSSTTAPATGTYNLQEIVPGSVWMERDVYLQGPIWAKIPETGAHFHPSPAMGGFGLKHPPPMMLIKNTPVPGNITSLSDVPVSSFITQYSTGQVTVEMEWELKKENSKRWNPEIQYTNNYNDPQFVDFAPDSTGEYRTTRPIGTRYLTRPL

SEQ ID NO: 866 - protein, 724 aa, Artificial Sequence
  source: /note="Description of Artificial Sequence: Synthetic polypeptide"
MSFVDHPPDWLEEVGEGLREFLGLEAGPPKPKPNQQHQDQARGLVLPGYNYLGPGNGLDRGEPANRADEVAREHDISYNEQLEAGDNPYLKYNHAGAEFQEKLADDTSFGGNLGKAVFQAKKRVLEPFGLVEEGAKTAPTGKRIDDHFPKRKKARTEEDSKPSTSSDAEAGPSGSQQLQIPAQPASSLGADTMSAGGGGPLGDNNQGADGVGNASGDWHCDSTWMGDRVVTKSTRTWVLPGYNNHQYREIKSGSVDGSNANAYFGYSTPWGYFDFNRFHSHWSPRDWQRLINNYWGFRPRSLRVKIFNIQVKEVTVQDSTTTIANNLTSTVQVFTDDDYQLPYVVGNGTEGCLPAFPPQVFTLPQYGYATLNRDNTENPTERSSFFCLEYFPSKMLRTGNNFEFTYNFEEVPFHSSFAPSQNLFKLANPLVDQYLYRFVSTNNTGGVQFNKNLAGRYANTYKNWFPGPMGRTQGWNLGSGVNRASVSAFATTNRMELEGASYQVPPQPNGMTNNLQGSNTYALENTMIFNSQPANPGTTATYLEGNMLITSESETQPVNRVAYNVGGQMATNNQSSTTAPATGTYNLQEIVPGSVWMERDVYLQGPIWAKIPETGAHFHPSPAMGGFGLKHPPPMMLIKNTPVPGNITSFSDVPVSSFITQYSTGQVTVEMEWELKKENSKRWNPEIQYTNNYNDPQFVDFAPDSTGEYRTTRPIGTRYLTRPL

SEQ ID NO: 867 - protein, 724 aa, Artificial Sequence
  source: /note="Description of Artificial Sequence: Synthetic polypeptide"
MSFVDHPPDWLEEVGEGLREFLGLEAGPPKPKPNQQHQDQARGLVLPGYNYLGPGNGLDRGEPVNRADEVAREHDISYNEQLEAGDNPYLKYNHADAEFQEKLADDTSFGGNLGKAVFQAKKRVLEPFGLVEEGAKTAPTGKRIDDHFPKRKKARTEEDSKPPTSSDAEAGPSGSQQLQIPAQPASSLGADTMSAGGGGPLGDNNQGADGVGNASGDWHCDSTWMGDRVVTKSTRTWVLPSYNNHQYREIKSGSVDGSNANAYFGYSTPWGYFDFNRFHSHWSPRDWQRLINNYWGFRPRSLRVKIFNIQVKEVTVQDSATTIANNLTSTVQVFTDDDYQLPYVVGNGTEGCLPAFPPQVFTLPQYGYATLNRDNTENPTERSSFFCLEYFPSKMLRTGNNFEFTYNFEEVPFHSSFAPSQNLFKLANPLVDQYLYRFVSTNNTGGVQFNKNLAGRYANTYKNWFPGPMGRTQGWNLGSGVNRASVSAFATTNRMELEGASYQVPPQPNGMTNNLQGSNTYALENTMIFNSQPANPGTTATYLEGNMLITSESETQPVNRVAYNVGGQMATNNQSSTTAPATGTYNLQEIVPGSVWMERDVYLQGPIWAKIPETGAHFHPSPAMGGFGLKHPPPMMLIKNTPVPGNITSFSDVPVSSFITQYSTGQVTVEMEWELKKENSKRWNPEIQYTNNYNDPQFVDFAPDSTGEYRTTRPIGTRYLTRPL

SEQ ID NO: 868 - protein, 724 aa, Artificial Sequence
  source: /note="Description of Artificial Sequence: Synthetic polypeptide"
MSFVDHPPDWLEEVGEGLREFLGLEAGPPKPKPNQQHQDQARGLVLPGYNYLGPGNGLDRGEPVNRADEVAREHDISYNEQLEAGDNPYLKYNHADAEFQEKLADDTSFGGNLGKAVFQAKKRVLEPFGLVEEGAKTAPTGKRIDDHFPKRKKARTEEDSKPSTSSDAEAGPSGSQQPQIPAQPASSLGADTMSAGGGGPLGDNNQGADGVGNASGDWHCDSTWMGDRVVTKSTRTWVLPSYNNHQYREIKSGSVDGSNANAYFGYSTPWGYFDFNRFHSHWSPRDWQRLINNYWGFRPRSLRVKIFNIQVKEVTVQDSTTTIANNLTSTVQVFTDDDYQLPYVVGNGTEGCLPAFPPQVFTLPQYGYATLNRDNTENPTERSSFFCLEYFPSKMLRTGNNFEFTYNFEEVPFHSSFAPSQNLFKLANPLVDQYLYRFVSTNNTGGVQFNKNLAGRYANTYKNWFPGPMGRTQGWNLGSGVNRASVSAFATTNRMELEGASYQVPPQPNGMTNNLQGSNTYALENTMIFNSQPANPGTTATYLEGNMLITSESETQPVNRVAYNVGGQMATNNQSSTTAPATGTYNLQEIVPGSVWMERDVYLQGPIWAKIPETGAHFHPSPAMGGFGLKHPPPMMLIKNTPAPGNITSFSDVPVSSFITQYSTGQVTVEMEWELKKENSKRWNPEIQYTNNYNDPQFVDFAPDSTGEYRTTRPIGTRYLTRPL

SEQ ID NO: 869 - protein, 724 aa, Artificial Sequence
  source: /note="Description of Artificial Sequence: Synthetic polypeptide"
MSFVDHPPDWLEEVGEGLREFLGLEAGPPKPKPNQQHQDQARGLVLPGYNYLGPGNGLDRGEPVNRADEVAREHDISYNEQLEAGDNPYLKYNHADAEFQEKLADDTSFGGNLGKAVFQAKKRVLEPFGLVEEGAKTAPTGKRIDDHFPKRKKARTEEDSKPPTSSDAEAGPSGSQQLQIPAQPASSLGADTMSAGGGGPLGDNNQGADGVGNASGDWHCDSTWMGDRVVTKSTRTWVLPSYNNHQYREIKSGSVDGSNANAYFGYSTPWGYFDFNRFHSHWSPRDWQRLINNYWGFRPRSLRVKIFNIQVKEVTVQDSTTTIANNLTSTVQVFTDDDYQLPYVVGNGTEGCLPAFPPQVFTLPQYGYATLNRDNTENPTERSSFFCLEYFPSKMLRTGNNFEFTYNFEEVPFHSSFAPSQNLFKLANPLVDQYLYRFVSTNNTGGVQFNKNLAGRYANTYKNWFPGPMGRTQGWNLGSGVNRASVSAFATTNRMELEGASYQVPPQPNGMTNNLQGSNTYALENTMIFNSQPANPGTTATYLEGNMLITSESETQPVNRVAYNVGGQMATNNQSSTTAPATGTYNLQEIVPGSVWMERDVYLQGPIWAKIPETGAHFHPSPAMGGFGLKHPPPMMLIKNTPVPGNITSFSDVPVSSFITQYSTGQVTVEMEWELKKENSKRWNPEIQYTNNYNDPQFVDFAPDSTGEYRTTRPIGTRYLTRPL

SEQ ID NO: 870 - protein, 724 aa, Artificial Sequence
  source: /note="Description of Artificial Sequence: Synthetic polypeptide"
MSFVDHPPDWLEEVGEGLREFLGLEAGPPKPKPNQQHQDQARGLVLPGYNYLGPGNGLDRGEPVNRADEVAREHDISYNEQLEAGDNPYLKYNHADAEFQEKLADDTSFGGNLGKAVFQAKKRVLEPFGLVEEGAKTAPTGKRIDDHFPKRKKARTEEDSKPPTSSDAEAGPSGSQQLQIPAQPASSLGADTMSAGGGGPLGDNNQGADGVGNASGDWHCDSTWMGDRVVTKSTRTWVPPSYNNHQYREIKSGSVDGSNANAYFGYSTPWGYFDFNRFHSHWSPRDWQRLINNYWGFRPRSLRVKIFNIQVKEVTVQDSTTTIANNLTSTVQVFTDDDYQLPYVVGNGTEGCLPAFPPQVFTLPQYGYATLNRDNTENPTERSSFFCLEYFPSKMLRTGNNFEFTYNFEEVPFHSSFAPSQNLFKLANPLVDQYLYRFVSTNNTGGVQFNKNLAGRYANTYKNWFPGPMGRTQGWNLGSGVNRASVSAFATTNRMELEGASYQVPPQPNGMTNNLQGSNTYALENTMIFNSQPANPGTTATYLEGNMLITSESETQPVNRVAYNVGGQMATNNQSSTTAPATGTYNLQEIVPGSVWMERDVYLQGPIWAKIPETGAHFHPSPAMGGFGLKHPPPMMLIKNTPVPGNITSFSDVPVSSFITQYSTGQVAVEMEWELKKENSKRWNPEIQYTNNYNDPQFVDFAPDSTGEYRTTRPIGTRYLTRPL

SEQ ID NO: 871 - protein, 724 aa, Artificial Sequence
  source: /note="Description of Artificial Sequence: Synthetic polypeptide"
MSFVDHPPDWLEEVGEGLREFLGLEAGPPKPKPNQQHQDQARGLVLPGYNYLGPGNGLDRGEPVNRADEVAREHDISYNEQLEAGDNPYLKYNHADAEFQEKLADDTSFGGNLGKAVFQAKKRVLEPFGLVEEGAKTAPTGKRIDDHFPKRKKARTEEDSKPSTSSDAEAGPSGSQQLQIPAQPASSLGADTMSAGGGGPLGDNNQGADGVGNASGDWHCDSTWMGDRVVTKSTRTWVLPSYNNHQYREIKSGSVDGSNANAYFGYSTPWGYFDFNRFHSHWSPRDWQRLINNYWGFRPRSLRVKIFNIQVKEVTVQDSTTTIANNLTSTVQVFTDDDYQLPYVVGNGTEGCLPAFPPQVFTLPQYGYATLNRDNTENPTERSSFFCLEYFPSKMLRTGNNFEFTYNFEEVPFHSSFAPSQNLFKLANPLVDQYLYRFVSTNNTGGVQFNKNLAGRYANTYKNWFPGPMGRTQGWNLGSGVNRASVSAFATTNRMELEGASYQVPPQPNGMTNNLQGSNTYALENTMIFNSQPANPGTTATYLEGNMLITSESETQPVNRVAYNVGGQMATNNQSSTTAPATGTYNLQEIVPGSVWMERDVYLQGPIWAKIPETGAHFHPSPAMGGFGLKHPPPMMLIKNTPAPGNITSFSDVPVSSFITQYSTGQVTVEMEWELKKENSKRWNPEIQYTNNYNDPQFVDFAPDSTGEYRTTRPIGTRYLTRPL

SEQ ID NO: 872 - protein, 724 aa, Artificial Sequence
  source: /note="Description of Artificial Sequence: Synthetic polypeptide"
MSFVDHPPDWLEEVGEGLREFLGLEAGPPKPKPNQQHQDQARGLVLPGYNYLGPGNGLDRGEPVNRADEVAREHDISYNEQLEAGDNPYLKYNHADAEFQEKLADDTSFGGNLGKAVFQAKKRVLEPFGLAEEGAKTAPTGKRIDDHFPKRKKARTEEDSKPSTSSDAEAGPSGSQQLQIPAQPASSLGADTMSAGGGGPLGDNNQGADGVGNASGDWHCDSTWMGDRVVTKSTRTWVLPSYNNHQYREIKSGSVDGSNANAYFGYSTPWGYFDFNRFHSHWSPRDWQRLINNYWGFRPRSLRAKIFNIQVKEVTVQDSTTTIANNLTSTVQVFTDDDYQLPYVVGNGTEGCLPAFPPQVFTLPQYGYATLNRDNTENPTERSSFFCLEYFPSKMLRTGNNLEFTYNFEEVPFHSSFAPSQNLFKLANPLVDQYLYRFVSTNNTGGVQFNKNLAGRYANTYKNWFPGPMGRTQGWNLGSGVNRASVSAFATTNRMELEGASYQVPPQPNGMTNNLQGSNTYALENTMIFNSQPANPGTTATYLEGNMLITSESETQPVNRVVHNVGGQMATNNQSSTTAPATGTYNLQEIVPGSVWMERDVYLQGPIWAKIPETGAHFHPSPAMGGFGLKHPPPMMLIKNTPVPGNITSFSDVPVSSFITQYSTGQVTVEMEWELKKENSKRWNPEIQYTNNYNDPQFVDFAPDSTGEYRTTRPIGTRYLTRPL

SEQ ID NO: 873 - protein, 724 aa, Artificial Sequence
  source: /note="Description of Artificial Sequence: Synthetic polypeptide"
MSFVDHPPDWLEEVGEGLREFLGLEAGPPKPKPNQQHQDQARGLVLPGYNYLGPGNGLDRGEPVNRADEVAREHDISYNEQLEAGDNPYLKYNHADAEFQEKLADDTSFGGNLGKAVFQAKKRVLEPFGLVEEGAKTAPTGKRIDDHFPKRKKARTEEDSKPSTSSDAEAGPSGSQQLQIPAQPASSLGADTMSAGGGGPLGDNNQGADGVGNASGDWHCDSTWMGDRVVTKSTRTWVLPSYNNHQYREIKSGSVDGGNANAYFGYSTPWGYFDFNRFHSHWSPRDWQRLINNYWGFRPRSLRVKIFNIQVKEVTVQDSTTTIANNLTSTVQVFTDDDYQLPYVVGNGTEGCLPAFPPQVFTLPQYGYATLNRDNTENPTERSSFFCLEYFPSKMLRTGNNFEFTYNFEEVPFHSSFAPSQNLFKLANPLVDQYLYRFVSTNNTGGVQFNKNLAGRYANTYKNWFPGPMGRTQGWNLGSGVNRASVSAFATTNRMELEGASYQVPPQPNGMTNNLQGSNTYALENTMIFNSQPANPGTTATYLEGNMLITSESETQPVNRVAYNVGGQMATNNQSSTTAPATGTYNLQEIVPGSVWMERDVYLQGPIWAKIPETGAHFHPSPAMGGFGLKHPPPMMLIKNTPAPGNITSFSDVPVSSFITQYSTGQVTVEMEWELKKGNSKRWNPEIQYTNNYNDPQFVDFAPDSTGEYRTTRPIGTRYLTRPL

SEQ ID NO: 874 - protein, 724 aa, Artificial Sequence
  source: /note="Description of Artificial Sequence: Synthetic polypeptide"
MSFVDHPPDWLEEVGEGLREFLGLEAGPPKPKPNQQHQDQARGLVLPGYNYLGPGNGLDRGEPVNRADEVAREHDISYNEQLEAGDNPYLKYNHADAEFQEKLADDTSFGGNLGKAVFQAKKRVLEPFGLVEEGAKTAPTGKRIDDHFPKRKKARTEEDSKPSTSSDAEAGPSGSQQLQIPAQPASSLGADTMSAGGGGPLGDNNQGADGVGNASGDWHCDSTWMGDRVVTKSTRTWVLPSYNNHQYREIKSGSVDGSNANAYFGYSTPWGYFDFNRFHSHWSPRDWQRLINNYWGFRPRSLRVKIFNIQVKEVTVQDSTTTIANNLTSTVQVFTDDDYQLPYVVGNGTEGCLPAFPPQVFTLPQYGYATLNRDNTENPTERSSFFCLEYFPSKMLRTGNNFEFTYNFEEVPFHSSFAPSQNLFKLANPLVDQYLYRFVSTNNTGGVQFNKNLAGRYANTYKNWFPGPMGRTQGWNLGSGVNRASVSAFATTNRMELEGASYQVPPQPNGMTNNLQGSNTYALENTMIFNSQPANPGTTATYLEGNMLITSESETQPVNRVAYNVGGQMATNNQSSTTAPATGTYNLQEIVPGSVWMERDVYLQGPIWAKIPETGVHFHPSPAMGGFGLKHPPPMMLIKNTPVPGNITSFSDVPVSSFITQYSTGQVTVEMEWELKKENSKRWNPEIQYTNNYNDPQFVDFAPDSTGEYRTTRPIGTRYLTRPL

SEQ ID NO: 875 - protein, 724 aa, Artificial Sequence
  source: /note="Description of Artificial Sequence: Synthetic polypeptide"
  MOD_RES (551)..(551): Any naturally occurring amino acid
MSFVDHPPDWLEEVGEGLREFLGLEAGPPKPKPNQQHQDQARGLVLPGYNYLGPGNGLDRGEPVNRADEVAREHDISYNEQLEAGDNPYLKYNHADAEFQEKLADDTSFGGNLGKAVFQAKKRVLEPFGLVEEGAKTAPTGKRIDDHFPKRKKARTEEDSKPSTSSDAEAGPSGSQQLQIPAQPASSLGADTMSAGGGGPLGDNNQGADGVGNASGDWHCDSTWMGDRVVTKSTRTWVLPSYNNHQYREIKSGSVDGSNANAYFGYSTPWGYFDFNRFHSHWSPRDWQRLINNYWGFRPRSLRVKIFNIQVKEVTVQDSTTTIANNLTSTVQVFTDDDYQLPYVVGNGTEGCLPAFPPQVFTLPQYGYATLNRDNTENPTERSSFFCLEYFPSKMLRTGNNFEFTYNFEEVPFHSSFAPSQNLFKLANPLVDQYLYRFVSTNNTGGVQFNKNLAGRYANTYKNWFPGPMGRTQGWNLGSGVNRASVSAFATTNRMELEGASYQVPPQPNGMTNNLQGSNTYALENTMIFNSQPANPGTTATYLEGSMLITXESETQPVNRVAYNVGGQMATNNQSSTTAPATGTYNLQEIVPGSVWMERDVYLQGPIWAKIPETGAHFHPSPAMGGFGLKHPPPMMLIKNTPVPGNITSFSDVPVSSFITQYSTGQVTVEMEWELKKENSKRWNPEIQYTNNYNDPQFVDFAPDSTGEYRTTRPIGTRYLTRPL

SEQ ID NO: 876 - protein, 736 aa, Artificial Sequence; identical to SEQ ID NO: 50
  source: /note="Description of Artificial Sequence: Synthetic polypeptide"

SEQ ID NO: 877 - protein, 734 aa, Artificial Sequence; identical to SEQ ID NO: 68
  source: /note="Description of Artificial Sequence: Synthetic polypeptide"

SEQ ID NO: 878 - protein, 723 aa, Artificial Sequence
  source: /note="Description of Artificial Sequence: Synthetic polypeptide"
MSFVDHPPDWLEEVGEGLREFLGLEAGPPKPKPNQQHQDQARGLVLPGYNYLGPGNGLDRGEPVNRADEVAREHDISYNEQLEAGDNPYLKYNHADAEFQEKLADDTSFGGNLGKAVFQAKKRVLEPFGLVEEGAKTAPTGKRIDDHFPKRKKARTEEDSKPSTSSDAEAGPSGSQQLQIPAQPASSLGADTMSAGGGPLGDNNQGADGVGNASGDWHCDSTWMGDRVVTKSTRTWVLPSYNNHQYREIKSGSVDGSNANAYFGYSTPWGYFDFNRFHSHWSPRDWQRLINNYWGFRPRSLRVKIFNIQVKEVTVQDSTTTIANNLTSTVQVFTDDDYQLPYVVGNGTEGCLPAFPPQVFTLPQYGYATLNRDNTENPTERSSFFCLEYFPSKMLRTGNNFEFTYNFEEVPFHSSFAPSQNLFKLANPLVDQYLYRFVSTNNTGGVQFNKNLAGRYANTYKNWFPGPMGRTQGWNLGSGVNRASVSAFATTNRMELEGASYQVPPQPNGMTNNLQGSNTYALENTMIFNSQPANPGTTATYLEGNMLITSESETQPVNRVAYNVGGQMATNNQSSTTAPATGTYNLQEIVPGSVWMERDVYLQGPIWAKIPETGAHFHPSPAMGGFGLKHPPPMMLIKNTPVPGNITSFSDVPVSSFITQYSTGQVTVEMEWELKKENSKRWNPEIQYTNNYNDPQFVDFAPDSTGEYRTTRPIGTRYLTRPL

SEQ ID NO: 879 - protein, 534 aa, Artificial Sequence
  source: /note="Description of Artificial Sequence: Synthetic polypeptide"
MAEGGGGAMGDSSGGADGVGNASGNWHCDSQWMGNTVITKTTRTWVLPSYNNHIYKAITSGTSQDANVQYAGYSTPWGYFDFNRFHCHFSPRDWQRLINNHWGIRPKSLKFKIFNVQVKEVTTQDQTKTIANNLTSTIQVFTDDEHQLPYVLGSATEGTMPPFPSDVYALPQYGYCTMHTNQNGARFNDRSAFYCLEYFPSQMLRTGNNFEFTFDFEEVPFHSMFAHSQDLDRLMNPLVDQYLWNFNEVDSSRNAQFKKAVKGAYGTMGRNWLPGPKFLDQRVRAYTGGTDNYANWNIWSNGNKVNLKDRQYLLQPGPVSATYTEGEASSLPAQNILGIAKDPYRSGSTTAGISDIMVTEEQEVAPTNGVGWKPYGRTVTNEQNTTTAPTSSDLDVLGALPGMVWQNRDIYLQGPIGAKIPKTDGKFHPSPNLGGFGLHNPPPQVFIKNTPVPADPPVEYVHQKWNSYITQYSTGQCTVEMVWELRKENSKRWNPEIQFTSNFSNRTSIMFAPNETGGYVEDRLIGTRYLTQNL

SEQ ID NO: 880 - protein, 554 aa, Artificial Sequence
  source: /note="Description of Artificial Sequence: Synthetic polypeptide"
MTSVNSAEASTGAGGGGSNPVKSMWSEGATFSANSVTCTFSRQFLIPYDPEHHYKVFSPAASSCHNASGKEAKVCTISPIMGYSTPWRYLDFNALNLFFSPLEFQHLIENYGSIAPDALTVTISEIAVKDVTDKTGGGVQVTDSTTGRLCMLVDHEYKYPYVLGQGQDTLAPELPIWVYFPPQYAYLTVGDVNTQGISGDSKKLASEESAFYVLEHSSFQLLGTGGTATMSYKFPPVPPENLEGCSQHFYEMYNPLYGSRLGVPDTLGGDPKFRSLTHEDHAIQPQNFMPGPLVNSVSTKEGDSFNTGAGKALTGLSTGTSQNTRISLRPGPVSQPYHHWDTDKYVTGINAISHGQTTYGNAEDKEYQQGVGRFPNEKEQLKQLQGLNMHTYFPNKGTQQYTDQIERPLMVGSVWNRRALHYESQLWSKIPNLDDSFKTQFAALGGWGLHQPPPQIFLKILPQSGPIGGIKSMGITTLVQYAVGIMTVTMTFKLGPRKATGRWNPQPGVYPPHAAGHLPYVLYDPTATDAKQHHRHGYEKPEELWTAKSRVHPL

SEQ ID NO: 881 - protein, 587 aa, Artificial Sequence
  source: /note="Description of Artificial Sequence: Synthetic polypeptide"
MSDGTSQPDGGNAVHSAARVERAADGPGGSGGGGSGGGGVGVSTGSYDNQTHYRFLGDGWVEITALATRLVHLNMPKSENYCRIRVHNTTDTSVKGNMAKDDAHEQIWTPWSLVDANAWGVWLQPSDWQYICNTMSQLNLVSLDQEIFNVVLKTVTEQDSGGQAIKIYNNDLTACMMVAVDSNNILPYTPAANSMETLGFYPWKPTIASPYRYYFCVDRDLSVTYENQEGTIEHNVMGTPKGMNSQFFTIENTQQITLLRTGDEFATGTYYFDTNPVKLTHTWQTNRQLGQPPLLSTFPEADTDAGTLTAQGSRHGATQMEVNWVSEAIRTRPAQVGFCQPHNDFEASRAGPFAAPKVPADVTQGMDREANGSVRYSYGKQHGENWAAHGPAPERYTWDETNFGSGRDTRDGFIQSAPLVVPPPLNGILTNANPIGTKNDIHFSNVFNSYGPLTTFSHPSPVYPQGQIWDKELDLEHKPRLHITAPFVCKNNAPGQMLVRLGPNLTDQYDPNGATLSRIVTYGTFFWKGKLTMRAKLRANTTWNPVYQVSVEDNGNSYMSVTKWLPTATGNMQSVPLITRPVARNTY

SEQ ID NO: 882 - protein, 584 aa, Artificial Sequence
  source: /note="Description of Artificial Sequence: Synthetic polypeptide"
MSDGAVQPDGGQPAVRNERATGSGNGSGGGGGGGSGGVGISTGTFNNQTEFKFLENGWVEITANSSRLVHLNMPESENYKRVVVNNMDKTAVKGNMALDDIHVEIVTPWSLVDANAWGVWFNPGDWQLIVNTMSELHLVSFEQEIFNVVLKTVSESATQPPTKVYNNDLTASLMVALDSNNTMPFTPAAMRSETLGFYPWKPTIPTPWRYYFQWDRTLIPSHTGTSGTPTNVYHGTDPDDVQFYTIENSVPVHLLRTGDEFATGTFFFDCKPCRLTHTWQTNRALGLPPFLNSLPQSEGATNFGDIGVQQDKRRGVTQMGNTDYITEATIMRPAEVGYSAPYYSFEASTQGPFKTPIAAGRGGAQTDENQAADGDPRYAFGRQHGQKTTTTGETPERFTYIAHQDTGRYPEGDWIQNINFNLPVTNDNVLLPTDPIGGKTGINYTNIFNTYGPLTALNNVPPVYPNGQIWDKEFDTDLKPRLHINAPFVCQNNCPGQLFVKVAPNLTNQYDPDASANMSRIVTYSDFWWKGKLVFKAKLRASHTWNPIQQMSINVDNQFNYVPNNIGAMKIVYEKSQLAPRKLY

SEQ ID NO: 883 - protein, 548 aa, Artificial Sequence
  source: /note="Description of Artificial Sequence: Synthetic polypeptide"
GVGISTGTFNNQTEFKFLENGWVEITANSSRLVHLNMPESENYRRVVVNNMDKTAVNGNMALDDIHAQIVTPWSLVDANAWGVWFNPGDWQLIVNTMSELHLVSFEQEIFNVVLKTVSESATQPPTKVYNNDLTASLMVALDSNNTMPFTPAAMRSETLGFYPWKPTIPTPWRYYFQWDRTLIPSHTGTSGTPTNIYHGTDPDDVQFYTIENSVPVHLLRTGDEFATGTFFFDCKPCRLTHTWQTNRALGLPPFLNSLPQSEGATNFGDIGVQQDKRRGVTQMGNTNYITEATIMRPAEVGYSAPYYSFEASTQGPFKTPIAAGRGGAQTDENQAADGNPRYAFGRQHGQKTTTTGETPERFTYIAHQDTGRYPEGDWIQNINFNLPVTNDNVLLPTDPIGGKTGINYTNIFNTYGPLTALNNVPPVYPNGQIWDKEFDTDLKPRLHVNAPFVCQNNCPGQLFVKVAPNLTNEYDPDASANMSRIVTYSDFWWKGKLVFKAKLRASHTWNPIQQMSINVDNQFNYVPSNIGGMKIVYEKSQLAPRKLY

SEQ ID NO: 884 - protein, 736 aa, Artificial Sequence; identical to SEQ ID NO: 112
  source: /note="Description of Artificial Sequence: Synthetic polypeptide"

SEQ ID NO: 885 - protein, 736 aa, Artificial Sequence; identical to SEQ ID NO: 107
  source: /note="Description of Artificial Sequence: Synthetic polypeptide"

SEQ ID NO: 886 - protein, 736 aa, Artificial Sequence
  source: /note="Description of Artificial Sequence: Synthetic polypeptide"
MAADGYLPDWLEDTLSEGIRQWWKLKPGPPPPKPAERHKDDSRGLVLPGYKYLGPFNGLDKGEPVNEADAAALEHDKAYDRQLDSGDNPYLKYNHADAEFQERLKEDTSFGGNLGRAVFQAKKRVLEPLGLVEEPVKTAPGKKRPVEHSPVEEPDSSSGTGKAGQQPARKRLNFGQTGDADSVPDPQPLGQPPAAPSGLGTNTMATGSGAPMADNNEGADGVGNSSGNWHCDSTWMGDRVITTSTRTWALPTYNNHLYKQISSQSGASNDNHYFGYSTPWGYFDFNRFHCHFSPRDWQRLINNNWGFRPKRLNFKLFNIQVKEVTQNDGTTTIANNLTSTVQVFTDSEYQLPYVLGSAHQGCLPPFPADVFMVPQYGYLTLNNGSQAVGRSSFYCLEYFPSQMLRTGNNFTFSYTFEDVPFHSSYAHSQSLDRLMNPLIDQYLYYLSRTNTPSGTTTQSRLQFSQAGASDIRDQSRNWLPGPCYRQQRVSKTSADNNNSEYSWTGATKYHLNGRDSLVNPGPAMASHKDDEEKFFPQSGVLIFGKQGSEKTNVDIEKVMITDEEEIRTTNPVATEQYGSVSTNLQRGNRQAATADVNTQGVLPGMVWQDRDVYLQGPIWAKIPHTDGHFHPSPLMGGFGLKHPPPQILIKNTPVPANPSTTFSAAKFASFITQYSTGQVSVEIEWELQKENSKRWNPEIQYTSNYNKSVNVDFTVDTNGVYSEPRPIGTRYLTRNL

SEQ ID NO: 887 - protein, 736 aa, Artificial Sequence
  source: /note="Description of Artificial Sequence: Synthetic polypeptide"
MAADGYLPDWLEDNLSEGIREWWDLKPGAPKPKANQQKQDDGRGLVLPGYKYLGPFNGLDKGEPVNAADAAALEHDKAYDQQLKAGDNPYLRYNHADAEFQERLQEDTSFGGNLGRAVFQAKKRVLEPFGLVEEGAKTAPGKKRPVEQSPQEPDSSSGIGKTGQQPAKKRLNFGQTGDSESVPDPQPLGEPPATPAAVGPTTMASGGGAPMADNNEGADGVGNASGNWHCDSTWLGDRVITTSTRTWALPTYNNHLYKQISSASTGASNDNHYFGYSTPWGYFDFNRFHCHFSPRDWQRLINNNWGFRPKRLNFKLFNVQVKEVTTNDGVTTIANNLTSTVQVFSDSEYQLPYVLGSAHQGCLPPFPADVFMIPQYGYLTLNNGSQAVGRSSFYCLEYFPSQMLRTGNNFTFSYTFEDVPFHSSYAHSQSLDRLMNPLIDQYLYYLNRTQDQSGSAQNKDLLFSRGSPAGMSVQPKNWLPGPCYRQQRVSKTKTDNNNSNFTWTGASKYNLNGRESIINPGTAMASHKDDKNKFFPMSGVMIFGKESAGASNTALDNVMITDEEEIKATNPVATERFGTVAVNLQSSSTDPATGDVHVMGALPGMVWQDRDVYLQGPIWAKIPHTDGHFHPSPLMGGFGLKNPPPQILIKNTPVPANPPAEFSATKFASFITQYSTGQVSVEIEWELQKENSKRWNPEVQYTSNYAKSANVDFTVDNNGLYTEPRPIGTRYLTRPL

SEQ ID NO: 888 - protein, 737 aa, Artificial Sequence
  source: /note="Description of Artificial Sequence: Synthetic polypeptide"
MAADGYLPDWLEDTLSEGIRQWWKLKPGPPPPKPAERHKDDSRGLVLPGYKYLGPGNGLDKGEPVNAADAAALEHDKAYDQQLKAGDNPYLKYNHADAEFQERLKEDTSFGGNLGRAVFQAKKRVLEPLGLVEEGAKTAPGKKRPVEPSPQRSPDSSTGIGKKGQQPARKRLNFGQTGDSESVPDPQPLGEPPATPAAVGPTTMASGGGAPMADNNEGADGVGNASGNWHCDSTWLGDRVITTSTRTWALPTYNNHLYKQISSASTGASNDNHYFGYSTPWGYFDFNRFHCHFSPRDWQRLINNNWGFRPKRLNFKLFNIQVKEVTTNDGVTTIANNLTSTVQVFSDSEYQLPYVLGSAHQGCLPPFPADVFMIPQYGYLTLNNGSQAVGRSSFYCLEYFPSQMLRTGNNFTFSYTFEDVPFHSSYAHSQSLDRLMNPLIDQYLYYLNRTQNQSGSAQNKDLLFSRGSPAGMSVQPKNWLPGPCYRQQRVSKTKTDNNNSNFTWTGASKYNLNGRESIINPGTAMASHKDDKDKFFPMSGVMIFGKESAGASNTALDNVMITDEEEIKATNPVATERFGTVAVNLQSSSTDPATEDVHVMGALPGMVWQDRDVYLQGPIWAKIPHTDGHFHPSPLMGGFGLKNPPPQILIKNTPVPANPPAEFSATKFASFITQYSTGQVSVEIEWELQKENSKRWNPEVQYTSNYAKSANVDFTVDNNGLYTEPRPIGTRYLTRNL

SEQ ID NO: 889 - protein, 736 aa, Artificial Sequence
  source: /note="Description of Artificial Sequence: Synthetic polypeptide"
MAADGYLPDWLEDNLSEGIREWWDLKPGAPKPKANQQKQDDGRGLVLPGYKYLGPFNGLDKGEPVNAADAAALEHDKAYDQQLKAGDNPYLRYNHADAEFQERLQEDTSFGGNLGRAVFQAKKRVLEPFGLVEEGAKTAPGKKRPVEQSPQEPDSSSGIGKTGQQPAKKRLNFGQTGDSESVPDPQPLGEPPATPAAVGPTTMASGGGAPMADNNEGADGVGNASGNWHCDSTWLGDRVITTSTRTWALPTYNNHLYKQISSASTGASNDNHYFGYSTPWGYFDFNRFHCHFSPRDWQRLINNNWGFRPKRLNFKLFNVQVKEVTTNDGVTTIANNLTSTVQVFSDSEYQLPYVLGSAHQGCLPPFPADVFMIPQYGYLTLNNGSQAVGRSSFYCLEYFPSQMLRTGNNFTFSYTFEDVPFHSSYAHSQSLDRLMNPLIDQYLYYLNRTQDQSGSAQNKDLLFSRGSPAGMSVQPKNWLPGPCYRQQRVSKTKTDNNNSNFTWTGASKYNLNGRESIINPGTAMASHKDDKNKFFPMSGVMIFGKESAGASNTALDNVMITDEEEIKATNPVATERFGTVAVNLQSSSTDPATGDVHVMGALPGMVWQDRDVYLQGPIWAKIPHTDGHFHPSPLMGGFGLKHPPPQILIKNTPVPANPPAEFSATKFASFITQYSTGQVSVEIEWELQKENSKRWNPEVQYTSNYAKSANVDFTVDNNGLYTEPRPIGTRYLTRPL

SEQ ID NO: 890 - protein, 736 aa, Artificial Sequence
  source: /note="Description of Artificial Sequence: Synthetic polypeptide"
MAADGYLPDWLEDNLSEGIREWWDLKPGAPKPKANQQKQDDGRGLVLPGYKYLGPFNGLDKGEPVNAADAAALEHDKAYDQQLKAGDNPYLRYNHADAEFQERLQEDTSFGGNLGRAVFQAKKRVLEPFGLVEEGAKTAPGKKRPVEQSPQEPDSSSGIGKTGQQPAKKRLNFGQTGDSESVPDPQPLGEPPATPAAVGPTTMASGGGAPMADNNEGADGVGNASGNWHCDSTWLGDRVITTSTRTWALPTYNNHLYKQISSASTGASNDNHYFGYSTPWGYFDFNRFHCHFSPRDWQRLINNNWGFRPKRLNFKLFNVQVKEVTTNDGVTTIANNLTSTVQVFSDSEYQLPYVLGSAHQGCLPPFPADVFMIPQYGYLTLNNGSQAVGRSSFYCLEYFPSQMLRTGNNFTFSYTFEDVPFHSSYAHSQSLDRLMNPLIDQYLYYLNRTQDQSGSAQNKDLLFSRGSPAGMSVQPKNWLPGPCYRQQRVSKTKTDNNNSNFTWTGASKYNLNGRESIINPGTAMASHKDDKDKFFPMSGVMIFGKESAGASNTALDNVMITDEEEIKATNPVATERFGTVAVNLQSSSTDPATGDVHVMGALPGMVWQDRDVYLQGPIWAKIPHTDGHFHPSPLMGGFGLKHPPPQILIKNTPVPANPPAEFSATKFASFITQYSTGQVSVEIEWELQKENSKRWNPEVQYTSNYAKSANVDFTVDNNGLYTEPRPIGTRYLTRPL

SEQ ID NO: 891 - protein, 736 aa, Artificial Sequence
  source: /note="Description of Artificial Sequence: Synthetic polypeptide"
MAADGYLPDWLEDNLSEGIREWWDLKPGAPKPKANQQKQDDGRGLVLPGYKYLGPFNGLDKGEPVNAADAAALEHDKAYDQQLKAGDNPYLRYNHADAEFQERLQEDTSFGGNLGRAVFQAKKRVLEPFGLVEEGAKTAPGKKRPVEQSPQEPDSSSGIGKTGQQPAKKRLNFGQTGDSESVPDPQPLGEPPATPAAVGPTTMASGGGAPMADNNEGADGVGNASGNWHCDSTWLGDRVITTSTRTWALPTYNNHLYKQISSASTGASNDNHYFGYSTPWGYFDFNRFHCHFSPRDWQRLINNNWGFRPKRLNFKLFNIQVKEVTTNDGVTTIANNLTSTVQVFSDSEYQLPYVLGSAHQGCLPPFPADVFMIPQYGYLTLNNGSQAVGRSSFYCLEYFPSQMLRTGNNFTFSYTFEDVPFHSSYAHSQSLDRLMNPLIDQYLYYLNRTQDQSGSAQNKDLLFSRGSPAGMSVQPKNWLPGPCYRQQRVSKTKTDNNNSNFTWTGASKYNLNGRESIINPGTAMASHKDDKNKFFPMSGVMIFGKESAGASNTALDNVMITDEEEIKATNPVATERFGTVAVNLQSSSTDPATGDVHVMGALPGMVWQDRDVYLQGPIWAKIPHTDGHFHPSPLMGGFGLKHPPPQILIKNTPVPANPPAEFSATKFASFITQYSTGQVSVEIEWELQKENSKRWNPEVQYTSNYAKSANVDFTVDNNGLYTEPRPIGTRYLTRPL

SEQ ID NO: 892 - protein, 736 aa, Artificial Sequence
  source: /note="Description of Artificial Sequence: Synthetic polypeptide"
MAADGYLPDWLEDNLSEGIREWWDLKPGAPKPKANQQKQDDGRGLVLPGYKYLGPFNGLDKGEPVNAADAAALEHDKAYDQQLKAGDNPYLRYNHADAEFQERLQEDTSFGGNLGRAVFQAKKRVLEPFGLVEEGAKTAPGKKRPVEQSPQEPDSSSGIGKTGQQPAKKRLNFGQTGDSESVPDPQPLGEPPATPAAVGPTTMASGGGAPMADNNEGADGVGNASGNWHCDSTWLGDRVITTSTRTWALPTYNNHLYKQISSASTGASNDNHYFGYSTPWGYFDFNRFHCHFSPRDWQRLINNNWGFRPKRLNFKLFNVQVKEVTTNDGVTTIANNLTSTVQVFSDSEYQLPYVLGSAHQGCLPPFPADVFMIPQYGYLTLNNGSQAVGRSSFYCLEYFPSQMLRTGNNFTFSYTFEDVPFHSSYAHSQSLDRLMNPLIDQYLYYLNRTQNQSGSAQNKDLLFSRGSPAGMSVQPKNWLPGPCYRQQRVSKTKTDNNNSNFTWTGASKYNLNGRESIINPGTAMASHKDDKDKFFPMSGVMIFGKESAGASNTALDNVMITDEEEIKATNPVATERFGTVAVNLQSSSTDPATGDVHVMGALPGMVWQDRDVYLQGPIWAKIPHTDGHFHPSPLMGGFGLKHPPPQILIKNTPVPANPPAEFSATKFASFITQYSTGQVSVEIEWELQKENSKRWNPEVQYTSNYAKSANVDFTVDNNGLYTEPRPIGTRYLTRPL

SEQ ID NO: 893 - protein, 736 aa, Artificial Sequence
  source: /note="Description of Artificial Sequence: Synthetic polypeptide"
MAADGYLPDWLEDNLSEGIREWWDLKPGAPKPKANQQKQDDGRGLVLPGYKYLGPFNGLDKGEPVNAADAAALEHDKAYDQQLKAGDNPYLRYNHADAEFQERLQEDTSFGGNLGRAVFQAKKRVLEPFGLVEEGAKTAPGKKRPVEQSPQEPDSSSGIGKTGQQPAKKRLNFGQTGDSESVPDPQPLGEPPATPAAVGPTTMASGGGAPMADNNEGADGVGNASGNWHCDSTWLGDRVITTSTRTWALPTYNNHLYKQISSASTGASNDNHYFGYSTPWGYFDFNRFHCHFSPRDWQRLINNNWGFRPKRLNFKLFNVQVKEVTTNDGVTTIANNLTSTVQVFSDSEYQLPYVLGSAHQGCLPPFPADVFMIPQYGYLTLNNGSQAVGRSSFYCLEYFPSQMLRTGNNFTFSYTFEDVPFHSSYAHSQSLDRLMNPLIDQYLYYLNRTQNQSGSAQNKDLLFSRGSPAGMSVQPKNWLPGPCYRQQRVSKTKTDNNNSNFTWTGASKYNLNGRESIINPGTAMASHKDDKNKFFPMSGVMIFGKESAGASNTALDNVMITDEEEIKATNPVATERFGTVAVNLQSSSTDPATGDVHVMGALPGMVWQDRDVYLQGPIWAKIPHTDGHFHPSPLMGGFGLKHPPPQILIKNTPVPANPPAEFSATKFASFITQYSTGQVSVEIEWELQKENSKRWNPEVQYTSNYAKSANVDFTVDNNGLYTEPRPIGTRYLTRPL

SEQ ID NO: 894 - DNA, 2217 bp, Artificial Sequence
  source: /note="Description of Artificial Sequence: Synthetic polynucleotide"
atggctgccgatggttatcttccagattggctcgaggacaacctctctgagggcattcgcgagtggtgggacctgaaacctggagccccgaaacccaaagccaaccagcaaaagcaggacaacggccggggtctggtgcttcctggctacaagtacctcggacccttcaacggactcgacaagggggagcccgtcaacgcggcggacgcagcggccctcgagcacgacaaggcctacgaccagcagctccaagcgggtgacaatccgtacctgcggtataatcacgccgacgccgagtttcaggagcgtctgcaagaagatacgtcttttgggggcaacctcgggcgcgcagtcttccaggccaaaaagcgggttctcgaacctctgggcctggttgaatcgccggttaagacggctcctggaaagaagagaccggtagagccatcaccccagcgctctccagactcctctacgggcatcggcaagaaaggccagcagcccgcaaaaaagagactcaattttgggcagactggcgactcagagtcagtccccgaccctcaaccaatcggagaaccaccagcaggcccctctggtctgggatctggtacaatggctgcaggcggtggcgctccaatggcagacaataacgaaggcgccgacggagtgggtagttcctcaggaaattggcattgcgattccacatggctgggcgacagagtcatcaccaccagcacccgcacctgggccctgcccacctacaacaaccacctctacaagcaaatctccaacgggacctcgggaggaagcaccaacgacaacacctacttcggctacagcaccccctgggggtattttgacttcaacagattccactgccacttttcaccacgtgactggcagcgactcatcaacaacaactggggattccggcccaagaggctcaacttcaagctcttcaacatccaagtcaaggaggtcacgcagaatgaaggcaccaagaccatcgccaataaccttaccagcacgattcaggtctttacggactcggaataccagctcccgtacgtgctcggctcggcgcaccagggctgcctgcctccgttcccggcggacgtcttcatgattcctcagtacgggtacctgactctgaacaatggcagtcaggctgtgggccggtcgtccttctactgcctggagtactttccttctcaaatgctgagaacgggcaacaactttgaattcagctacaacttcgaggacgtgcccttccacagcagctacgcgcacagccagagcctggaccggctgatgaaccctctcatcgaccagtacttgtactacctgtcccggactcaaagcacgggcggtactgcaggaactcagcagttgctattttctcaggccgggcctaacaacatgtcggctcaggccaagaactggctacccggtccctgctaccggcagcaacgcgtctccacgacactgtcgcagaacaacaacagcaactttgcctggacgggtgccaccaagtatcatctgaatggcagagactctctggtgaatcctggcgttgccatggctacccacaaggacgacgaagagcgattttttccatccagcggagtcttaatgtttgggaaacagggagctggaaaagacaacgtggactatagcagcgtgatgctaaccagcgaggaagaaataaagaccaccaacccagtggccacagaacagtacggcgtggtggccgataacctgcaacagcaaaacgccgctcctattgtaggggccgtcaatagtcaaggagccttacctggcatggtgtggcagaaccgggacgtgtacctgcagggtcccatctgggccaagattcctcatacggacggcaactttcatccctcgccgctgatgggaggctttggactgaagcatccgcctcctcagatcctgattaaaaacacacctgttcccgcggatcctccgaccaccttcaatcaggccaagctggcttctttcatcacgcagtacagtaccggccaggtcagcgtggagatcgagtgggagctgcagaaggagaacagcaaacgctggaacccagagattcagtacacttccaactactacaaatctacaaatgtggactttgctgtcaatactgagggtacttattccgagcctcgccccattggcacccgttacctcacccgtaatctgtaa

SEQ ID NO: 895 - protein, 738 aa, Artificial Sequence
  source: /note="Description of Artificial Sequence: Synthetic polypeptide"
MAADGYLPDWLEDNLSEGIREWWDLKPGAPKPKANQQKQDNGRGLVLPGYKYLGPFNGLDKGEPVNAADAAALEHDKAYDQQLQAGDNPYLRYNHADAEFQERLQEDTSFGGNLGRAVFQAKKRVLEPLGLVESPVKTAPGKKRPVEPSPQRSPDSSTGIGKKGQQPAKKRLNFGQTGDSESVPDPQPIGEPPAGPSGLGSGTMAAGGGAPMADNNEGADGVGSSSGNWHCDSTWLGDRVITTSTRTWALPTYNNHLYKQISNGTSGGSTNDNTYFGYSTPWGYFDFNRFHCHFSPRDWQRLINNNWGFRPKRLNFKLFNIQVKEVTQNEGTKTIANNLTSTIQVFTDSEYQLPYVLGSAHQGCLPPFPADVFMIPQYGYLTLNNGSQAVGRSSFYCLEYFPSQMLRTGNNFEFSYNFEDVPFHSSYAHSQSLDRLMNPLIDQYLYYLSRTQSTGGTAGTQQLLFSQAGPNNMSAQAKNWLPGPCYRQQRVSTTLSQNNNSNFAWTGATKYHLNGRDSLVNPGVAMATHKDDEERFFPSSGVLMFGKQGAGKDNVDYSSVMLTSEEEIKTTNPVATEQYGVVADNLQQQNAAPIVGAVNSQGALPGMVWQNRDVYLQGPIWAKIPHTDGNFHPSPLMGGFGLKHPPPQILIKNTPVPADPPTTFNQAKLASFITQYSTGQVSVEIEWELQKENSKRWNPEIQYTSNYYKSTNVDFAVNTEGTYSEPRPIGTRYLTRNL

SEQ ID NO: 896 - protein, 738 aa, Artificial Sequence; identical to SEQ ID NO: 895
  source: /note="Description of Artificial Sequence: Synthetic polypeptide"

SEQ ID NO: 897 - DNA, 4472 bp, Artificial Sequence
  source: /note="Description of Artificial Sequence: Synthetic polynucleotide"
ctccatcactaggggtaaccgcgaagcgcctcccacgctgccgcgtcagcgctgacgtaaattacgtcataggggagtggtcctgtattagctgtcacgtgagtgcttttgcgacattttgcgacaccacgtggccattcatggtatatatggccgagtgagcgagcaggatctccattttgaccgcgaaatttgaacgagcagcagccatgccgggcttctacgagatcgtgcttaaggtgccgagcgacctggacgagcacctgccgggcatttctgactcgtttgtgaactgggtggcagagaaggaatgggagctgcccccggattctgacatggatcggaatctgattgagcaggcacccctgaccgtggccgagaagctacagcgcgacttcctggtccaatggcgccgcgtgagtaaggccccggaggccctcttctttgttcagttcgagaagggcgagtcctacttccacctccatattctggtagagaccacgggggtcaaatccatggtgctgggccgcttcctgagtcagattcgggacaagctggtgcagaccatctaccgcgggatcgagccgaccctgcccaactggttcgcggtgacaaagacgcgtaatggcgccggaggggggaacaaggtggtggacgagtgctacatccccaactacctgctgcccaagactcagcccgagctgcagtgggcgtggactaacatggaggagtatataagcgcgtgcttgaacctggccgagcgcaaacggctcgtggcgcagcacctgacccacgtcagccagacccaggagcagaacaaggagaatctgaacccgaattctgacgcgcctgtcatccggtcaaaaacctccgcgcgctacatggagctggtcgggtggctggtggaccggggcatcacctccgagaagcagtggatccaggaggaccaggcctcgtacatctccttcaacgccgcctccaactcgcggtctcagatcaaggccgcgctggacaatgccggcaagatcatggcgctgaccaaatccgcgcccgactacctggtaggccccgctctgcccgcggacattaaatccaaccgcatctaccgcatcctggagctgaatggctacgaccctgcctacgccggttccgtctttctcggctgggcccagaaaaagtttggcaaaaggaacaccatctggctgtttgggccggccaccacgggcaagaccaacatcgcggaagccatcgcccacgccgtgcccttctacggctgcgtcaactggaccaatgagaactttcccttcaacgattgcgtcgacaagatggtgatctggtgggaggagggcaagatgacggccaaggtcgtggagtccgccaaggccattctcggcggcagcaaggtgcgcgtggaccaaaagtgcaagtcgtccgcccagatcgatcccacccccgtgatcgtcacctccaacaccaacatgtgcgccgtgattgacgggaacagcaccaccttcgagcaccagcagccgttgcaggaccggatgttcaaatttgaacttacccgccgtctggagcacgactttggcaaggtgacaaagcaggaagtcaaagagttcttccgctgggcgcaggatcacgtgaccgaggtggcgcatgagttctacgtcagaaagggtggagctaacaaaagacccgcccccgatgacgcggatataagcgagcccaagcgggcctgcccctcagtcgcggatccatcgacgtcagacgcggaaggagctccggtggactttgccgacaggtaccaaaacaaatgttctcgtcacgcgggcatgcttcagatgctgtttccctgcaaaacatgcgagagaatgaatcagaatttcaacatttgcttcacgcacgggaccagagactgttcagaatgtttccctggcgtgtcagaatctcaaccggtcgtcagaaaaaagacgtatcggaaactctgtgcgattcatcatctgctggggcgggcacccgagattgcttgctcggcctgcgacctggtcaacgtggacctggatgactgtgtttctgagcaataaatgacttaaaccaggtatggctgccgatggttatcttccagattggctcgaggacaacctctctgagggcattcgcgagtggtgggacctgaaacctggagccccgaaacccaaagccaaccagcaaaagcaggacaacggccggggtctggtgcttcctggctacaagtacctcggacccttcaacggactcgacaagggggagcccgtcaacgcggcggacgcagcggccctcgagcacgacaaggcctacgaccagcagctccaagcgggtgacaatccgtacctgcggtataatcacgccgacgccgagtttcaggagcgtctgcaagaagatacgtcttttgggggcaacctcgggcgcgcagtcttccaggccaaaaagcgggttctcgaacctctgggcctggttgaatcgccggttaagacggctcctggaaagaagagaccggtagagccatcaccccagcgctctccagactcctctacgggcatcggcaagaaaggccagcagcccgcaaaaaagagactcaattttgggcagactggcgactcagagtcagtccccgaccctcaaccaatcggagaaccaccagcaggcccctctggtctgggatctggtacaatggctgcaggcggtggcgctccaatggcagacaataacgaaggcgccgacggagtgggtagttcctcaggaaattggcattgcgattccacatggctgggcgacagagtcatcaccaccagcacccgcacctgggccctgcccacctacaacaaccacctctacaagcaaatctccaacgggacctcgggaggaagcaccaacgacaacacctacttcggctacagcaccccctgggggtattttgacttcaacagattccactgccacttttcaccacgtgactggcagcgactcatcaacaacaactggggattccggcccaagaggctcaacttcaagctcttcaacatccaagtcaaggaggtcacgcagaatgaaggcaccaagaccatcgccaataaccttaccagcacgattcaggtctttacggactcggaataccagctcccgtacgtgctcggctcggcgcaccagggctgcctgcctccgttcccggcggacgtcttcatgattcctcagtacgggtacctgactctgaacaatggcagtcaggctgtgggccggtcgtccttctactgcctggagtactttccttctcaaatgctgagaacgggcaacaactttgaattcagctacaacttcgaggacgtgcccttccacagcagctacgcgcacagccagagcctggaccggctgatgaaccctctcatcgaccagtacttgtactacctgtcccggactcaaagcacgggcggtactgcaggaactcagcagttgctattttctcaggccgggcctaacaacatgtcggctcaggccaagaactggctacccggtccctgctaccggcagcaacgcgtctccacgacactgtcgcagaacaacaacagcaactttgcctggacgggtgccaccaagtatcatctgaatggcagagactctctggtgaatcctggcgttgccatggctacccacaaggacgacgaagagcgattttttccatccagcggagtcttaatgtttgggaaacagggagctggaaaagacaacgtggactatagcagcgtgatgctaaccagcgaggaagaaataaagaccaccaacccagtggccacagaacagtacggcgtggtggccgataacctgcaacagcaaaacgccgctcctattgtaggggccgtcaatagtcaaggagccttacctggcatggtgtggcagaaccgggacgtgtacctgcagggtcccatctgggccaagattcctcatacggacggcaactttcatccctcgccgctgatgggaggctttggactgaagcatccgcctcctcagatcctgattaaaaacacacctgttcccgcggatcctccgaccaccttcaatcaggccaagctggcttctttcatcacgcagtacagtaccggccaggtcagcgtggagatcgagtgggagctgcagaaggagaacagcaaacgctggaacccagagattcagtacacttccaactactacaaatctacaaatgtggactttgctgtcaatactgagggtacttattccgagcctcgccccattggcacccgttacctcacccgtaatctgtaattacatgttaatcaataaaccggttaattcgtttcagttgaactttggtctcctgtccttcttatcttatcggttaccatagaaactggttacttattaactgcttggtgcgcttcgcgataaaagacttacgtcatcgggttacccctagtgatgga

SEQ ID NO: 898 - protein, 738 aa, Artificial Sequence
  source: /note="Description of Artificial Sequence: Synthetic polypeptide"
MAADGYLPDWLEDNLSEGIREWWDLKPGAPKPKANQQKQDNGRGLVLPGYKYLGPFNGLDKGEPVNAADAAALEHDKAYDQQLQAGDNPYLRYNHADAEFQERLQEDTSFGGNLGRAVFQAKKRVLEPLGLVESPVKTAPGKKRPVEPSPQRSPDSSTGIGKKGQQPAKKRLNFGQTGDSESVPDPQPIGEPPAAPSGVGPNTMAAGGGAPMADNNEGADGVGSSSGNWHCDSTWLGDRVITTSTRTWALPTYNNHLYKQISNGTSGGSTNDNTYFGYSTPWGYFDFNRFHCHFSPRDWQRLINNNWGFRPKRLNFKLFNIQVKEVTQNEGTKTIANNLTSTIQVFTDSEYQLPYVLGSAHQGCLPPFPADVFMIPQYGYLTLNNGSQAVGRSSFYCLEYFPSQMLRTGNNFEFSYNFEDVPFHSSYAHSQSLDRLMNPLIDQYLYYLSRTQSTGGTAGTQQLLFSQAGPNNMSAQAKNWLPGPCYRQQRVSTTLSQNNNSNFAWTGATKYHLNGRDSLVNPGVAMATHKDDEERFFPSSGVLMFGKQGAGKDNVDYSSVMLTSEEEIKTTNPVATEQYGVVADNLQQQNAAPIVGAVNSQGALPGMVWQNRDVYLQGPIWAKIPHTDGNFHPSPLMGGFGLKHPPPQILIKNTPVPADPPTTFNQAKLASFITQYSTGQVSVEIEWELQKENSKRWNPEIQYTSNYYKSTNVDFAVNTEGTYSEPRPIGTRYLTRNL

SEQ ID NO: 899 - protein, 738 aa, Artificial Sequence
  source: /note="Description of Artificial Sequence: Synthetic polypeptide"
MAADGYLPDWLEDNLSEGIREWWDLKPGAPKPKANQQRQDNGRGLVLPGYRYLGPFNGLDKGEPVNAADAAALEHDRAYDQQLQAGDNPYLRYNHADAEFQERLQEDTSFGGNLGRAVFQAKKRVLEPLGLVESPVRTAPGKKRPVEPSPQRSPDSSTGIGKKGQQPARKRLNFGQTGDSESVPDPQPIGEPPAAPSGVGPNTMAAGGGAPMADNNEGADGVGSSSGNWHCDSTWLGDRVITTSTRTWALPTYNNHLYRQISNGTSGGSTNDNTYFGYSTPWGYFDFNRFHCHFSPRDWQRLINNNWGFRPKRLNFKLFNIQVKEVTQNEGTRTIANNLTSTIQVFTDSEYQLPYVLGSAHQGCLPPFPADVFMIPQYGYLTLNNGSQAVGRSSFYCLEYFPSQMLRTGNNFEFSYNFEDVPFHSSYAHSQSLDRLMNPLIDQYLYYLSRTQSTGGTAGTQQLLFSQAGPNNMSAQAKNWLPGPCYRQQRVSTTLSQNNNSNFAWTGATKYHLNGRDSLVNPGVAMATHRDDEERFFPSSGVLMFGRQGAGRDNVDYSSVMLTSEEEIRTTNPVATEQYGVVADNLQQQNAAPIVGAVNSQGALPGMVWQNRDVYLQGPIWAKIPHTDGNFHPSPLMGGFGLKHPPPQILIKNTPVPADPPTTFNQAKLASFITQYSTGQVSVEIEWELQKENSKRWNPEIQYTSNYYKSTNVDFAVNTEGTYSEPRPIGTRYLTRNL

SEQ ID NO: 900 - protein, 738 aa, Artificial Sequence
  source: /note="Description of Artificial Sequence: Synthetic polypeptide"
MAADGYLPDWLEDNLSEGIREWWDLKPGAPKPKANQQRQDNGRGLVLPGYRYLGPFNGLDKGEPVNAADAAALEHDRAYDQQLQAGDNPYLRYNHADAEFQERLQEDTSFGGNLGRAVFQAKKRVLEPLGLVESPVRTAPGKKRPVEPSPQRSPDSSTGIGKRGQQPARKRLNFGQTGDSESVPDPQPIGEPPAAPSGVGPNTMAAGGGAPMADNNEGADGVGSSSGNWHCDSTWLGDRVITTSTRTWALPTYNNHLYRQISNGTSGGSTNDNTYFGYSTPWGYFDFNRFHCHFSPRDWQRLINNNWGFRPKRLNFKLFNIQVKEVTQNEGTRTIANNLTSTIQVFTDSEYQLPYVLGSAHQGCLPPFPADVFMIPQYGYLTLNNGSQAVGRSSFYCLEYFPSQMLRTGNNFEFSYNFEDVPFHSSYAHSQSLDRLMNPLIDQYLYYLSRTQSTGGTAGTQQLLFSQAGPNNMSAQAKNWLPGPCYRQQRVSTTLSQNNNSNFAWTGATKYHLNGRDSLVNPGVAMATHRDDEERFFPSSGVLMFGKQGAGRDNVDYSSVMLTSEEEIRTTNPVATEQYGVVADNLQQQNAAPIVGAVNSQGALPGMVWQNRDVYLQGPIWAKIPHTDGNFHPSPLMGGFGLKHPPPQILIKNTPVPADPPTTFNQAKLASFITQYSTGQVSVEIEWELQKENSKRWNPEIQYTSNYYKSTNVDFAVNTEGTYSEPRPIGTRYLTRNL

SEQ ID NO: 901 - protein, 738 aa, Artificial Sequence
  source: /note="Description of Artificial Sequence: Synthetic polypeptide"
MAADGYLPDWLEDNLSEGIREWWDLKPGAPKPKANQQRQDNGRGLVLPGYRYLGPFNGLDKGEPVNAADAAALEHDRAYDQQLQAGDNPYLRYNHADAEFQERLQEDTSFGGNLGRAVFQAKKRVLEPLGLVESPVRTAPGKKRPVEPSPQRSPDSSTGIGKRGQQPAKKRLNFGQTGDSESVPDPQPIGEPPAAPSGVGPNTMAAGGGAPMADNNEGADGVGSSSGNWHCDSTWLGDRVITTSTRTWALPTYNNHLYRQISNGTSGGSTNDNTYFGYSTPWGYFDFNRFHCHFSPRDWQRLINNNWGFRPKRLNFKLFNIQVKEVTQNEGTRTIANNLTSTIQVFTDSEYQLPYVLGSAHQGCLPPFPADVFMIPQYGYLTLNNGSQAVGRSSFYCLEYFPSQMLRTGNNFEFSYNFEDVPFHSSYAHSQSLDRLMNPLIDQYLYYLSRTQSTGGTAGTQQLLFSQAGPNNMSAQAKNWLPGPCYRQQRVSTTLSQNNNSNFAWTGATKYHLNGRDSLVNPGVAMATHRDDEERFFPSSGVLMFGRQGAGRDNVDYSSVMLTSEEEIRTTNPVATEQYGVVADNLQQQNAAPIVGAVNSQGALPGMVWQNRDVYLQGPIWAKIPHTDGNFHPSPLMGGFGLKHPPPQILIKNTPVPADPPTTFNQAKLASFITQYSTGQVSVEIEWELQKENSKRWNPEIQYTSNYYKSTNVDFAVNTEGTYSEPRPIGTRYLTRNL

SEQ ID NO: 902 - protein, 738 aa, Artificial Sequence
  source: /note="Description of Artificial Sequence: Synthetic polypeptide"
MAADGYLPDWLEDNLSEGIREWWDLKPGAPKPKANQQRQDNGRGLVLPGYRYLGPFNGLDKGEPVNAADAAALEHDRAYDQQLQAGDNPYLRYNHADAEFQERLQEDTSFGGNLGRAVFQAKKRVLEPLGLVESPVRTAPGKKRPVEPSPQRSPDSSTGIGKRGQQPAKKRLNFGQTGDSESVPDPQPIGEPPAAPSGVGPNTMAAGGGAPMADNNEGADGVGSSSGNWHCDSTWLGDRVITTSTRTWALPTYNNHLYRQISNGTSGGSTNDNTYFGYSTPWGYFDFNRFHCHFSPRDWQRLINNNWGFRPKRLNFKLFNIQVKEVTQNEGTRTIANNLTSTIQVFTDSEYQLPYVLGSAHQGCLPPFPADVFMIPQYGYLTLNNGSQAVGRSSFYCLEYFPSQMLRTGNNFEFSYNFEDVPFHSSYAHSQSLDRLMNPLIDQYLYYLSRTQSTGGTAGTQQLLFSQAGPNNMSAQAKNWLPGPCYRQQRVSTTLSQNNNSNFAWTGATKYHLNGRDSLVNPGVAMATHRDDEERFFPSSGVLMFGKQGAGRDNVDYSSVMLTSEEEIRTTNPVATEQYGVVADNLQQQNAAPIVGAVNSQGALPGMVWQNRDVYLQGPIWAKIPHTDGNFHPSPLMGGFGLKHPPPQILIKNTPVPADPPTTFNQARLASFITQYSTGQVSVEIEWELQKENSKRWNPEIQYTSNYYKSTNVDFAVNTEGTYSEPRPIGTRYLTRNL

SEQ ID NO: 903 - protein, 738 aa, Artificial Sequence
  source: /note="Description of Artificial Sequence: Synthetic polypeptide"
MAADGYLPDWLEDNLSEGIREWWDLKPGAPKPKANQQRQDNGRGLVLPGYRYLGPFNGLDKGEPVNAADAAALEHDRAYDQQLQAGDNPYLRYNHADAEFQERLQEDTSFGGNLGRAVFQAKKRVLEPLGLVESPVRTAPGKKRPVEPSPQRSPDSSTGIGKKGQQPAKKRLNFGQTGDSESVPDPQPIGEPPAAPSGVGPNTMAAGGGAPMADNNEGADGVGSSSGNWHCDSTWLGDRVITTSTRTWALPTYNNHLYRQISNGTSGGSTNDNTYFGYSTPWGYFDFNRFHCHFSPRDWQRLINNNWGFRPKRLNFKLFNIQVKEVTQNEGTRTIANNLTSTIQVFTDSEYQLPYVLGSAHQGCLPPFPADVFMIPQYGYLTLNNGSQAVGRSSFYCLEYFPSQMLRTGNNFEFSYNFEDVPFHSSYAHSQSLDRLMNPLIDQYLYYLSRTQSTGGTAGTQQLLFSQAGPNNMSAQAKNWLPGPCYRQQRVSTTLSQNNNSNFAWTGATKYHLNGRDSLVNPGVAMATHRDDEERFFPSSGVLMFGRQGAGRDNVDYSSVMLTSEEEIRTTNPVATEQYGVVADNLQQQNAAPIVGAVNSQGALPGMVWQNRDVYLQGPIWAKIPHTDGNFHPSPLMGGFGLKHPPPQILIKNTPVPADPPTTFNQARLASFITQYSTGQVSVEIEWELQKENSKRWNPEIQYTSNYYKSTNVDFAVNTEGTYSEPRPIGTRYLTRNL

SEQ ID NO: 904 - DNA, 2214 bp, Artificial Sequence
  source: /note="Description of Artificial Sequence: Synthetic polynucleotide"
atggctgccgatggttatcttccagattggctcgaggacaacctctctgagggcattcgcgagtggtgggacctgaaacctggagccccgaaacccaaagccaaccagcaaaagcaggacaacggccggggtctggtgcttcctggctacaagtacctcggacccttcaacggactcgacaagggggagcccgtcaacgcggcggacgcagcggccctcgagcacgacaaggcctacgaccagcagctccaagcgggtgacaatccgtacctgcggtataatcacgccgacgccgagtttcaggagcgtctgcaagaagatacgtcttttgggggcaacctcgggcgcgcagtcttccaggccaaaaagcgggttctcgaacctctgggcctggttgaatcgccggttaagacggctcctggaaagaagagaccggtagagccatcaccccagcgctctccagactcctctacgggcatcggcaagaaaggccagcagcccgcaaaaaagagactcaattttgggcagactggcgactcagagtcagtccccgaccctcaaccaatcggagaaccaccagcagccccctctggtgtgggacctaatacaatggctgcaggcggtggcgctccaatggcagacaataacgaaggcgccgacggagtgggtagttcctcaggaaattggcattgcgattccacatggctgggcgacagagtcatcaccaccagcacccgcacctgggccctgcccacctacaacaaccacctctacaagcaaatctccaacgggacctcgggaggaagcaccaacgacaacacctacttcggctacagcaccccctgggggtattttgacttcaacagattccactgccacttttcaccacgtgactggcagcgactcatcaacaacaactggggattccggcccaagaggctcaacttcaagctcttcaacatccaagtcaaggaggtcacgcagaatgaaggcaccaagaccatcgccaataaccttaccagcacgattcaggtctttacggactcggaataccagctcccgtacgtgctcggctcggcgcaccagggctgcctgcctccgttcccggcggacgtcttcatgattcctcagtacgggtacctgactctgaacaatggcagtcaggctgtgggccggtcgtccttctactgcctggagtactttccttctcaaatgctgagaacgggcaacaactttgaattcagctacaacttcgaggacgtgcccttccacagcagctacgcgcacagccagagcctggaccggctgatgaaccctctcatcgaccagtacttgtactacctgtcccggactcaaagcacgggcggtactgcaggaactcagcagttgctattttctcaggccgggcctaacaacatgtcggctcaggccaagaactggctacccggtccctgctaccggcagcaacgcgtctccacgacactgtcgcagaacaacaacagcaactttgcctggacgggtgccaccaagtatcatctgaatggcagagactctctggtgaatcctggcgttgccatggctacccacaaggacgacgaagagcgattttttccatccagcggagtcttaatgtttgggaaacagggagctggaaaagacaacgtggactatagcagcgtgatgctaaccagcgaggaagaaataaagaccaccaacccagtggccacagaacagtacggcgtggtggccgataacctgcaacagcaaaacgccgctcctattgtaggggccgtcaatagtcaaggagccttacctggcatggtgtggcagaaccgggacgtgtacctgcagggtcccatctgggccaagattcctcatacggacggcaactttcatccctcgccgctgatgggaggctttggactgaagcatccgcctcctcagatcctgattaaaaacacacctgttcccgcggatcctccgaccaccttcaatcaggccaagctggcttctttcatcacgcagtacagtaccggccaggtcagcgtggagatcgagtgggagctgcagaaggagaacagcaaacgctggaacccagagattcagtacacttccaactactacaaatctacaaatgtggactttgctgtcaatactgagggtacttattccgagcctcgccccattggcacccgttacctcacccgtaatctg

SEQ ID NO: 905 - DNA, 2217 bp, Artificial Sequence
  source: /note="Description of Artificial Sequence: Synthetic polynucleotide"
atggctgccgatggttatcttccagattggctcgaggacaacctctctgagggcattcgcgagtggtgggacctgaaacctggagccccgaaacccaaagccaaccagcaaaggcaggacaacggccggggtctggtgcttcctggctacaggtacctcggacccttcaacggactcgacaagggggagcccgtcaacgcggcggacgcagcggccctcgagcacgacagggcctacgaccagcagctccaagcgggtgacaatccgtacctgcggtataatcacgccgacgccgagtttcaggagcgtctgcaagaagatacgtcttttgggggcaacctcgggcgcgcagtcttccaggccaaaaagcgggttctcgaacctctgggcctggttgaatcgccggttaggacggctcctggaaagaagagaccggtagagccatcaccccagcgctctccagactcctctacgggcatcggcaagaaaggccagcagcccgcaagaaagagactcaattttgggcagactggcgactcagagtcagtccccgaccctcaaccaatcggagaaccaccagcagccccctctggtgtgggacctaatacaatggctgcaggcggtggcgctccaatggcagacaataacgaaggcgccgacggagtgggtagttcctcaggaaattggcattgcgattccacatggctgggcgacagagtcatcaccaccagcacccgcacctgggccctgcccacctacaacaaccacctctacaggcaaatctccaacgggacctcgggaggaagcaccaacgacaacacctacttcggctacagcaccccctgggggtattttgacttcaacagattccactgccacttttcaccacgtgactggcagcgactcatcaacaacaactggggattccggcccaagaggctcaacttcaagctcttcaacatccaagtcaaggaggtcacgcagaatgaaggcaccaggaccatcgccaataaccttaccagcacgattcaggtctttacggactcggaataccagctcccgtacgtgctcggctcggcgcaccagggctgcctgcctccgttcccggcggacgtcttcatgattcctcagtacgggtacctgactctgaacaatggcagtcaggctgtgggccggtcgtccttctactgcctggagtactttccttctcaaatgctgagaacgggcaacaactttgaattcagctacaacttcgaggacgtgcccttccacagcagctacgcgcacagccagagcctggaccggctgatgaaccctctcatcgaccagtacttgtactacctgtcccggactcaaagcacgggcggtactgcaggaactcagcagttgctattttctcaggccgggcctaacaacatgtcggctcaggccaagaactggctacccggtccctgctaccggcagcaacgcgtctccacgacactgtcgcagaacaacaacagcaactttgcctggacgggtgccaccaagtatcatctgaatggcagagactctctggtgaatcctggcgttgccatggctacccacagggacgacgaagagcgattttttccatccagcggagtcttaatgtttgggagacagggagctggaagagacaacgtggactatagcagcgtgatgctaaccagcgaggaagaaataaggaccaccaacccagtggccacagaacagtacggcgtggtggccgataacctgcaacagcaaaacgccgctcctattgtaggggccgtcaatagtcaaggagccttacctggcatggtgtggcagaaccgggacgtgtacctgcagggtcccatctgggccaagattcctcatacggacggcaactttcatccctcgccgctgatgggaggctttggactgaagcatccgcctcctcagatcctgattaaaaacacacctgttcccgcggatcctccgaccaccttcaatcaggccaagctggcttctttcatcacgcagtacagtaccggccaggtcagcgtggagatcgagtgggagctgcagaaggagaacagcaaacgctggaacccagagattcagtacacttccaactactacaaatctacaaatgtggactttgctgtcaatactgagggtacttattccgagcctcgccccattggcacccgttacctcacccgtaatctgtaa

SEQ ID NO: 906 - DNA, 2217 bp, Artificial Sequence
  source: /note="Description of Artificial Sequence: Synthetic polynucleotide"
atggctgccgatggttatcttccagattggctcgaggacaacctctctgagggcattcgcgagtggtgggacctgaaacctggagccccgaaacccaaagccaaccagcaaaggcaggacaacggccggggtctggtgcttcctggctacaggtacctcggacccttcaacggactcgacaagggggagcccgtcaacgcggcggacgcagcggccctcgagcacgacagggcctacgaccagcagctccaagcgggtgacaatccgtacctgcggtataatcacgccgacgccgagtttcaggagcgtctgcaagaagatacgtcttttgggggcaacctcgggcgcgcagtcttccaggccaaaaagcgggttctcgaacctctgggcctggttgaatcgccggttaggacggctcctggaaagaagagaccggtagagccatcaccccagcgctctccagactcctctacgggcatcggcaagagaggccagcagcccgcaagaaagagactcaattttgggcagactggcgactcagagtcagtccccgaccctcaaccaatcggagaaccaccagcagccccctctggtgtgggacctaatacaatggctgcaggcggtggcgctccaatggcagacaataacgaaggcgccgacggagtgggtagttcctcaggaaattggcattgcgattccacatggctgggcgacagagtcatcaccaccagcacccgcacctgggccctgcccacctacaacaaccacctctacaggcaaatctccaacgggacctcgggaggaagcaccaacgacaacacctacttcggctacagcaccccctgggggtattttgacttcaacagattccactgccacttttcaccacgtgactggcagcgactcatcaacaacaactggggattccggcccaagaggctcaacttcaagctcttcaacatccaagtcaaggaggtcacgcagaatgaaggcaccaggaccatcgccaataaccttaccagcacgattcaggtctttacggactcggaataccagctcccgtacgtgctcggctcggcgcaccagggctgcctgcctccgttcccggcggacgtcttcatgattcctcagtacgggtacctgactctgaacaatggcagtcaggctgtgggccggtcgtccttctactgcctggagtactttccttctcaaatgctgagaacgggcaacaactttgaattcagctacaacttcgaggacgtgcccttccacagcagctacgcgcacagccagagcctggaccggctgatgaaccctctcatcgaccagtacttgtactacctgtcccggactcaaagcacgggcggtactgcaggaactcagcagttgctattttctcaggccgggcctaacaacatgtcggctcaggccaagaactggctacccggtccctgctaccggcagcaacgcgtctccacgacactgtcgcagaacaacaacagcaactttgcctggacgggtgccaccaagtatcatctgaatggcagagactctctggtgaatcctggcgttgccatggctacccacagggacgacgaagagcgattttttccatccagcggagtcttaatgtttgggaaacagggagctggaagagacaacgtggactatagcagcgtgatgctaaccagcgaggaagaaataaggaccaccaacccagtggccacagaacagtacggcgtggtggccgataacctgcaacagcaaaacgccgctcctattgtaggggccgtcaatagtcaaggagccttacctggcatggtgtggcagaaccgggacgtgtacctgcagggtcccatctgggccaagattcctcatacggacggcaactttcatccctcgccgctgatgggaggctttggactgaagcatccgcctcctcagatcctgattaaaaacacacctgttcccgcggatcctccgaccaccttcaatcaggccaagctggcttctttcatcacgcagtacagtaccggccaggtcagcgtggagatcgagtgggagctgcagaaggagaacagcaaacgctggaacccagagattcagtacacttccaactactacaaatctacaaatgtggactttgctgtcaatactgagggtacttattccgagcctcgccccattggcacccgttacctcacccgtaatctgtaa

SEQ ID NO: 907 - DNA, 2217 bp, Artificial Sequence
  source: /note="Description of Artificial Sequence: Synthetic polynucleotide"
atggctgccgatggttatcttccagattggctcgaggacaacctctctgagggcattcgcgagtggtgggacctgaaacctggagccccgaaacccaaagccaaccagcaaaggcaggacaacggccggggtctggtgcttcctggctacaggtacctcggacccttcaacggactcgacaagggggagcccgtcaacgcggcggacgcagcggccctcgagcacgacagggcctacgaccagcagctccaagcgggtgacaatccgtacctgcggtataatcacgccgacgccgagtttcaggagcgtctgcaagaagatacgtcttttgggggcaacctcgggcgcgcagtcttccaggccaaaaagcgggttctcgaacctctgggcctggttgaatcgccggttaggacggctcctggaaagaagagaccggtagagccatcaccccagcgctctccagactcctctacgggcatcggcaagagaggccagcagcccgcaaaaaagagactcaattttgggcagactggcgactcagagtcagtccccgaccctcaaccaatcggagaaccaccagcagccccctctggtgtgggacctaatacaatggctgcaggcggtggcgctccaatggcagacaataacgaaggcgccgacggagtgggtagttcctcaggaaattggcattgcgattccacatggctgggcgacagagtcatcaccaccagcacccgcacctgggccctgcccacctacaacaaccacctctacaggcaaatctccaacgggacctcgggaggaagcaccaacgacaacacctacttcggctacagcaccccctgggggtattttgacttcaacagattccactgccacttttcaccacgtgactggcagcgactcatcaacaacaactggggattccggcccaagaggctcaacttcaagctcttcaacatccaagtcaaggaggtcacgcagaatgaaggcaccaggaccatcgccaataaccttaccagcacgattcaggtctttacggactcggaataccagctcccgtacgtgctcggctcggcgcaccagggctgcctgcctccgttcccggcggacgtcttcatgattcctcagtacgggtacctgactctgaacaatggcagtcaggctgtgggccggtcgtccttctactgcctggagtactttccttctcaaatgctgagaacgggcaacaactttgaattcagctacaacttcgaggacgtgcccttccacagcagctacgcgcacagccagagcctggaccggctgatgaaccctctcatcgaccagtacttgtactacctgtcccggactcaaagcacgggcggtactgcaggaactcagcagttgctattttctcaggccgggcctaacaacatgtcggctcaggccaagaactggctacccggtccctgctaccggcagcaacgcgtctccacgacactgtcgcagaacaacaacagcaactttgcctggacgggtgccaccaagtatcatctgaatggcagagactctctggtgaatcctggcgttgccatggctacccacagggacgacgaagagcgattttttccatccagcggagtcttaatgtttgggagacagggagctggaagagacaacgtggactatagcagcgtgatgctaaccagcgaggaagaaataaggaccaccaacccagtggccacagaacagtacggcgtggtggccgataacctgcaacagcaaaacgccgctcctattgtaggggccgtcaatagtcaaggagccttacctggcatggtgtggcagaaccgggacgtgtacctgcagggtcccatctgggccaagattcctcatacggacggcaactttcatccctcgccgctgatgggaggctttggactgaagcatccgcctcctcagatcctgattaaaaacacacctgttcccgcggatcctccgaccaccttcaatcaggccaagctggcttctttcatcacgcagtacagtaccggccaggtcagcgtggagatcgagtgggagctgcagaaggagaacagcaaacgctggaacccagagattcagtacacttccaactactacaaatctacaaatgtggactttgctgtcaatactgagggtacttattccgagcctcgccccattggcacccgttacctcacccgtaatctgtaa

SEQ ID NO: 908 - DNA, 2217 bp, Artificial Sequence
  source: /note="Description of Artificial Sequence: Synthetic polynucleotide"
atggctgccgatggttatcttccagattggctcgaggacaacctctctgagggcattcgcgagtggtgggacctgaaacctggagccccgaaacccaaagccaaccagcaaaggcaggacaacggccggggtctggtgcttcctggctacaggtacctcggacccttcaacggactcgacaagggggagcccgtcaacgcggcggacgcagcggccctcgagcacgacagggcctacgaccagcagctccaagcgggtgacaatccgtacctgcggtataatcacgccgacgccgagtttcaggagcgtctgcaagaagatacgtcttttgggggcaacctcgggcgcgcagtcttccaggccaaaaagcgggttctcgaacctctgggcctggttgaatcgccggttaggacggctcctggaaagaagagaccggtagagccatcaccccagcgctctccagactcctctacgggcatcggcaagagaggccagcagcccgcaaaaaagagactcaattttgggcagactggcgactcagagtcagtccccgaccctcaaccaatcggagaaccaccagcagccccctctggtgtgggacctaatacaatggctgcaggcggtggcgctccaatggcagacaataacgaaggcgccgacggagtgggtagttcctcaggaaattggcattgcgattccacatggctgggcgacagagtcatcaccaccagcacccgcacctgggccctgcccacctacaacaaccacctctacaggcaaatctccaacgggacctcgggaggaagcaccaacgacaacacctacttcggctacagcaccccctgggggtattttgacttcaacagattccactgccacttttcaccacgtgactggcagcgactcatcaacaacaactggggattccggcccaagaggctcaacttcaagctcttcaacatccaagtcaaggaggtcacgcagaatgaaggcaccaggaccatcgccaataaccttaccagcacgattcaggtctttacggactcggaataccagctcccgtacgtgctcggctcggcgcaccagggctgcctgcctccgttcccggcggacgtcttcatgattcctcagtacgggtacctgactctgaacaatggcagtcaggctgtgggccggtcgtccttctactgcctggagtactttccttctcaaatgctgagaacgggcaacaactttgaattcagctacaacttcgaggacgtgcccttccacagcagctacgcgcacagccagagcctggaccggctgatgaaccctctcatcgaccagtacttgtactacctgtcccggactcaaagcacgggcggtactgcaggaactcagcagttgctattttctcaggccgggcctaacaacatgtcggctcaggccaagaactggctacccggtccctgctaccggcagcaacgcgtctccacgacactgtcgcagaacaacaacagcaactttgcctggacgggtgccaccaagtatcatctgaatggcagagactctctggtgaatcctggcgttgccatggctacccacagggacgacgaagagcgattttttccatccagcggagtcttaatgtttgggaaacagggagctggaagagacaacgtggactatagcagcgtgatgctaaccagcgaggaagaaataaggaccaccaacccagtggccacagaacagtacggcgtggtggccgataacctgcaacagcaaaacgccgctcctattgtaggggccgtcaatagtcaaggagccttacctggcatggtgtggcagaaccgggacgtgtacctgcagggtcccatctgggccaagattcctcatacggacggcaactttcatccctcgccgctgatgggaggctttggactgaagcatccgcctcctcagatcctgattaaaaacacacctgttcccgcggatcctccgaccaccttcaatcaggccaggctggcttctttcatcacgcagtacagtaccggccaggtcagcgtggagatcgagtgggagctgcagaaggagaacagcaaacgctggaacccagagattcagtacacttccaactactacaaatctacaaatgtggactttgctgtcaatactgagggtacttattccgagcctcgccccattggcacccgttacctcacccgtaatctgtaa

SEQ ID NO: 909 - DNA, 2217 bp, Artificial Sequence
  source: /note="Description of Artificial Sequence: Synthetic polynucleotide"
atggctgccgatggttatcttccagattggctcgaggacaacctctctgagggcattcgcgagtggtgggacctgaaacctggagccccgaaacccaaagccaaccagcaaaggcaggacaacggccggggtctggtgcttcctggctacaggtacctcggacccttcaacggactcgacaagggggagcccgtcaacgcggcggacgcagcggccctcgagcacgacagggcctacgaccagcagctccaagcgggtgacaatccgtacctgcggtataatcacgccgacgccgagtttcaggagcgtctgcaagaagatacgtcttttgggggcaacctcgggcgcgcagtcttccaggccaaaaagcgggttctcgaacctctgggcctggttgaatcgccggttaggacggctcctggaaagaagagaccggtagagccatcaccccagcgctctccagactcctctacgggcatcggcaagaaaggccagcagcccgcaaaaaagagactcaattttgggcagactggcgactcagagtcagtccccgaccctcaaccaatcggagaaccaccagcagccccctctggtgtgggacctaatacaatggctgcaggcggtggcgctccaatggcagacaataacgaaggcgccgacggagtgggtagttcctcaggaaattggcattgcgattccacatggctgggcgacagagtcatcaccaccagcacccgcacctgggccctgcccacctacaacaaccacctctacaggcaaatctccaacgggacctcgggaggaagcaccaacgacaacacctacttcggctacagcaccccctgggggtattttgacttcaacagattccactgccacttttcaccacgtgactggcagcgactcatcaacaacaactggggattccggcccaagaggctcaacttcaagctcttcaacatccaagtcaaggaggtcacgcagaatgaaggcaccaggaccatcgccaataaccttaccagcacgattcaggtctttacggactcggaataccagctcccgtacgtgctcggctcggcgcaccagggctgcctgcctccgttcccggcggacgtcttcatgattcctcagtacgggtacctgactctgaacaatggcagtcaggctgtgggccggtcgtccttctactgcctggagtactttccttctcaaatgctgagaacgggcaacaactttgaattcagctacaacttcgaggacgtgcccttccacagcagctacgcgcacagccagagcctggaccggctgatgaaccctctcatcgaccagtacttgtactacctgtcccggactcaaagcacgggcggtactgcaggaactcagcagttgctattttctcaggccgggcctaacaacatgtcggctcaggccaagaactggctacccggtccctgctaccggcagcaacgcgtctccacgacactgtcgcagaacaacaacagcaactttgcctggacgggtgccaccaagtatcatctgaatggcagagactctctggtgaatcctggcgttgccatggctacccacagggacgacgaagagcgattttttccatccagcggagtcttaatgtttgggagacagggagctggaagagacaacgtggactatagcagcgtgatgctaaccagcgaggaagaaataaggaccaccaacccagtggccacagaacagtacggcgtggtggccgataacctgcaacagcaaaacgccgctcctattgtaggggccgtcaatagtcaaggagccttacctggcatggtgtggcagaaccgggacgtgtacctgcagggtcccatctgggccaagattcctcatacggacggcaactttcatccctcgccgctgatgggaggctttggactgaagcatccgcctcctcagatcctgattaaaaacacacctgttcccgcggatcctccgaccaccttcaatcaggccaggctggcttctttcatcacgcagtacagtaccggccaggtcagcgtggagatcgagtgggagctgcagaaggagaacagcaaacgctggaacccagagattcagtacacttccaactactacaaatctacaaatgtggactttgctgtcaatactgagggtacttattccgagcctcgccccattggcacccgttacctcacccgtaatctgtaa

SEQ ID NO: 910 - protein, 744 aa, Artificial Sequence
  source: /note="Description of Artificial Sequence: Synthetic polypeptide"
MAADGYLPDWLEDTLSEGIRQWWKLKPGPPPPKPAERHKDDSRGLVLPGYKYLGPFNGLDKGEPVNEADAAALEHDKAYDRQLDSGDNPYLKYNHADAEFQERLKEDTSFGGNLGRAVFQAKKRVLEPLGLVEEPVKTAPGKKRPVEHSPVEPDSSSGTGKAGQQPARKRLNFGQTGDADSVPDPQPLGQPPAAPSGLGTNTMATGSGAPMADNNEGADGVGNSSGNWHCDSTWMGDRVITTSTRTWALPTYNNHLYKQISSQSGASNDNHYFGYSTPWGYFDFNRFHCHFSPRDWQRLINNNWGFRPKRLNFKLFNIQVKEVTQNDGTTTIANNLTSTVQVFTDSEYQLPYVLGSAHQGCLPPFPADVFMVPQYGYLTLNNGSQAVGRSSFYCLEYFPSQMLRTGNNFTFSYTFEDVPFHSSYAHSQSLDRLMNPLIDQYLYYLSRTNTPSGTTTQSRLQFSQAGASDIRDQSRNWLPGPCYRQQRVSKTSADNNNSEYSWTGATKYHLNGRDSLVNPGPAMASHKDDEEKFFPQSGVLIFGKQGSEKTNVDIEKVMITDEEEIRTTNPVATEQYGSVSTNLQRGQRGESGHGYFAQAATADVNTQGVLPGMVWQDRDVYLQGPIWAKIPHTDGHFHPSPLMGGFGLKHPPPQILIKNTPVPANPSTTFSAAKFASFITQYSTGQVSVEIEWELQKENSKRWNPEIQYTSNYNKSVNVDFTVDTNGVYSEPRPIGTRYLTRNL

SEQ ID NO: 911 - DNA, 8359 bp, Artificial Sequence
  source: /note="Description of Artificial Sequence: Synthetic polynucleotide"
catcatcaataatataccttattttggattgaagccaatatgataatgagggggtggagtttgtgacgtggcgcggggcgtgggaacggggcgggtgacgtagtagctctagaggtcctgtattagaggtcacgtgagtgttttgcgacattttgcgacaccatgtggtcacgctgggtatttaagcccgagtgagcacgcagggtctccattttgaagcgggaggtttgaacgcgcagccgccatgccggggttttacgagattgtgattaaggtccccagcgaccttgacgagcatctgcccggcatttctgacagctttgtgaactgggtggccgagaaggaatgggagttgccgccagattctgacatggatctgaatctgattgagcaggcacccctgaccgtggccgagaagctgcagcgcgactttctgacggaatggcgccgtgtgagtaaggcaccggaggcccttttctttgtgcaatttgagaagggagagagctacttccacatgcacgtgctcgtggaaaccaccggggtgaaatccatggttttgggacgtttcctgagtcagattcgcgaaaaactgattcagagaatttaccgcgggatcgagccgactttgccaaactggttcgcggtcacaaagaccagaaatggcgccggaggcgggaacaaggtggtggatgagtgctacatccccaattacttgctccccaaaacccagcctgagctccagtgggcgtggactaatatggaacagtatttaagcgcctgtttgaatctcacggagcgtaaacggttggtggcgcagcatctgacgcacgtgtcgcagacgcaggagcagaacaaagagaatcagaatcccaattctgatgcgccggtgatcagatcaaaaacttcagccaggtacatggagctggtcgggtggctcgtggacaaggggattacctcggagaagcagtggatccaggaggaccaggcctcatacatctccttcaatgcggcctccaactcgcggtcccaaatcaaggctgccttggacaatgcgggaaagattatgagcctgactaaaaccgcccccgactacctggtgggccagcagcccgtggaggacatttccagcaatcggatttataaaattttggaactaaacgggtacgatccccaatatgcggcttccgtctttctgggatgggccacgaaaaagttcggcaagaggaacaccatctggctgtttgggcctgcaactaccgggaagaccaacatcgcggaggccatagcccacactgtgcccttctacgggtgcgtaaactggaccaatgagaactttcccttcaacgactgtgtcgacaagatggtgatctggtgggaggaggggaagatgaccgccaaggtcgtggagtcggccaaagccattctcggaggaagcaaggtgcgcgtggaccagaaatgcaagtcctcggcccagatagacccgactcccgtgatcgtcacctccaacaccaacatgtgcgccgtgattgacgggaactcaacgaccttcgaacaccagcagccgttgcaagaccggatgttcaaatttgaactcacccgccgtctggatcatgactttgggaaggtcaccaagcaggaagtcaaagactttttccggtgggcaaaggatcacgtggttgaggtggagcatgaattctacgtcaaaaagggtggagccaagaaaagacccgcccccagtgacgcagatataagtgagcccaaacgggtgcgcgagtcagttgcgcagccatcgacgtcagacgcggaagcttcgatcaactacgcagacaggtaccaaaacaaatgttctcgtcacgtgggcatgaatctgatgctgtttccctgcagacaatgcgagagaatgaatcagaattcaaatatctgcttcactcacggacagaaagactgtttagagtgctttcccgtgtcagaatctcaacccgtttctgtcgtcaaaaaggcgtatcagaaactgtgctacattcatcatatcatgggaaaggtgccagacgcttgcactgcctgcgatctggtcaatgtggatttggatgactgcatctttgaacaataaatgatttaaatcaggtatggctgccgatggttatcttccagattggctcgaggacactctctctgaaggaataagacagtggtggaagctcaaacctggcccaccaccaccaaagcccgcagagcggcataaggacgacagcaggggtcttgtgcttcctgggtacaagtacctcggacccttcaacggactcgacaagggagagccggtcaacgaggcagacgccgcggccctcgagcacgacaaagcctacgaccggcagctcgacagcggagacaacccgtacctcaagtacaaccacgccgacgcggagtttcaggagcgccttaaagaagatacgtcttttgggggcaacctcggacgagcagtcttccaggcgaaaaagagggttcttgaacctctgggcctggttgaggaacctgttaagacggctccgggaaaaaagaggccggtagagcactctcctgtggagccagactcctcctcgggaaccggaaaggcgggccagcagcctgcaagaaaaagattgaattttggtcagactggagacgcagactcagtacctgacccccagcctctcggacagccaccagcagccccctctggtctgggaactaatacgatggctacaggcagtggcgcaccaatggcagacaataacgagggcgccgacggagtgggtaattcctcgggaaattggcattgcgattccacatggatgggcgacagagtcatcaccaccagcacccgaacctgggccctgcccacctacaacaaccacctctacaaacaaatttccagccaatcaggagcctcgaacgacaatcactactttggctacagcaccccttgggggtattttgacttcaacagattccactgccacttttcaccacgtgactggcaaagactcatcaacaacaactggggattccgacccaagagactcaacttcaagctctttaacattcaagtcaaagaggtcacgcagaatgacggtacgacgacgattgccaataaccttaccagcacggttcaggtgtttactgactcggagtaccagctcccgtacgtcctcggctcggcgcatcaaggatgcctcccgccgttcccagcagacgtcttcatggtgccacagtatggatacctcaccctgaacaacgggagtcaggcagtaggacgctcttcattttactgcctggagtactttccttctcagatgctgcgtaccggaaacaactttaccttcagctacacttttgaggacgttcctttccacagcagctacgctcacagccagagtctggaccgtctcatgaatcctctcatcgaccagtacctgtattacttgagcagaacaaacactccaagtggaaccaccacgcagtcaaggcttcagttttctcaggccggagcgagtgacattcgggaccagtctaggaactggcttcctggaccctgttaccgccagcagcgagtatcaaagacatctgcggataacaacaacagtgaatactcgtggactggagctaccaagtaccacctcaatggcagagactctctggtgaatccgggcccggccatggcaagccacaaggacgatgaagaaaagttttttcctcagagcggggttctcatctttgggaagcaaggctcagagaaaacaaatgtggacattgaaaaggtcatgattacagacgaagaggaaatcaggacaaccaatcccgtggctacggagcagtatggttctgtatctaccaacctccagagaggccagagaggcgagtctggtcatggttattttgcccaggcggccaccgcagatgtcaacacacaaggcgttcttccaggcatggtctggcaggacagagatgtgtaccttcaggggcccatctgggcaaagattccacacacggacggacattttcacccctctcccctcatgggtggattcggacttaaacaccctcctccacagattctcatcaagaacaccccggtacctgcgaatccttcgaccaccttcagtgcggcaaagtttgcttccttcatcacacagtactccacgggacaggtcagcgtggagatcgagtgggagctgcagaaggaaaacagcaaacgctggaatcccgaaattcagtacacttccaactacaacaagtctgttaatgtggactttactgtggacactaatggcgtgtattcagagcctcgccccattggcaccagatacctgactcgtaatctgtaattgcttgttaatcaataaaccgtttaattcgtttcagttgaactttggtctctgcgtatttctttcttatctagtttccatgctctagaggtcctgtattagaggtcacgtgagtgttttgcgacattttgcgacaccatgtggtcacgctgggtatttaagcccgagtgagcacgcagggtctccattttgaagcgggaggtttgaacgcgcagccaccacggcggggttttacgagattgtgattaaggtccccagcgaccttgacgagcatctgcccggcatttctgacagctttgtgaactgggtggccgagaaggaatgggagttgccgccagattctgacatggatctgaatctgattgagcaggcacccctgaccgtggccgagaagctgcatcgctggcgtaatagcgaagaggcccgcaccgatcgcccttcccaacagttgcgcagcctgaatggcgaatggcgattccgttgcaatggctggcggtaatattgttctggatattaccagcaaggccgatagtttgagttcttctactcaggcaagtgatgttattactaatcaaagaagtattgcgacaacggttaatttgcgtgatggacagactcttttactcggtggcctcactgattataaaaacacttctcaggattctggcgtaccgttcctgtctaaaatccctttaatcggcctcctgtttagctcccgctctgattctaacgaggaaagcacgttatacgtgctcgtcaaagcaaccatagtacgcgccctgtagcggcgcattaagcgcggcgggtgtggtggttacgcgcagcgtgaccgctacacttgccagcgccctagcgcccgctcctttcgctttcttcccttcctttctcgccacgttcgccggctttccccgtcaagctctaaatcgggggctccctttagggttccgatttagtgctttacggcacctcgaccccaaaaaacttgattagggtgatggttcacgtagtgggccatcgccctgatagacggtttttcgccctttgacgttggagtccacgttctttaatagtggactcttgttccaaactggaacaacactcaaccctatctcggtctattcttttgatttataagggattttgccgatttcggcctattggttaaaaaatgagctgatttaacaaaaatttaacgcgaattttaacaaaatattaacgtttacaatttaaatatttgcttatacaatcttcctgtttttggggcttttctgattatcaaccggggtacatatgattgacatgctagttttacgattaccgttcatcgattctcttgtttgctccagactctcaggcaatgacctgatagcctttgtagagacctctcaaaaatagctaccctctccggcatgaatttatcagctagaacggttgaatatcatattgatggtgatttgactgtctccggcctttctcacccgtttgaatctttacctacacattactcaggcattgcatttaaaatatatgagggttctaaaaatttttatccttgcgttgaaataaaggcttctcccgcaaaagtattacagggtcataatgtttttggtacaaccgatttagctttatgctctgaggctttattgcttaattttgctaattctttgccttgcctgtatgatttattggatgttggaattcctgatgcggtattttctccttacgcatctgtgcggtatttcacaccgcatatggtgcactctcagtacaatctgctctgatgccgcatagttaagccagccccgacacccgccaacacccgctgacgcgccctgacgggcttgtctgctcccggcatccgcttacagacaagctgtgaccgtctccgggagctgcatgtgtcagaggttttcaccgtcatcaccgaaacgcgcgagacgaaagggcctcgtgatacgcctatttttataggttaatgtcatgataataatggtttcttagacgtcaggtggcacttttcggggaaatgtgcgcggaacccctatttgtttatttttctaaatacattcaaatatgtatccgctcatgagacaataaccctgataaatgcttcaataatattgaaaaaggaagagtatgagtattcaacatttccgtgtcgcccttattcccttttttgcggcattttgccttcctgtttttgctcacccagaaacgctggtgaaagtaaaagatgctgaagatcagttgggtgcacgagtgggttacatcgaactggatctcaacagcggtaagatccttgagagttttcgccccgaagaacgttttccaatgatgagcacttttaaagttctgctatgtggcgcggtattatcccgtattgacgccgggcaagagcaactcggtcgccgcatacactattctcagaatgacttggttgagtactcaccagtcacagaaaagcatcttacggatggcatgacagtaagagaattatgcagtgctgccataaccatgagtgataacactgcggccaacttacttctgacaacgatcggaggaccgaaggagctaaccgcttttttgcacaacatgggggatcatgtaactcgccttgatcgttgggaaccggagctgaatgaagccataccaaacgacgagcgtgacaccacgatgcctgtagcaatggcaacaacgttgcgcaaactattaactggcgaactacttactctagcttcccggcaacaattaatagactggatggaggcggataaagttgcaggaccacttctgcgctcggcccttccggctggctggtttattgctgataaatctggagccggtgagcgtgggtctcgcggtatcattgcagcactggggccagatggtaagccctcccgtatcgtagttatctacacgacggggagtcaggcaactatggatgaacgaaatagacagatcgctgagataggtgcctcactgattaagcattggtaactgtcagaccaagtttactcatatatactttagattgatttaaaacttcatttttaatttaaaaggatctaggtgaagatcctttttgataatctcatgaccaaaatcccttaacgtgagttttcgttccactgagcgtcagaccccgtagaaaagatcaaaggatcttcttgagatcctttttttctgcgcgtaatctgctgcttgcaaacaaaaaaaccaccgctaccagcggtggtttgtttgccggatcaagagctaccaactctttttccgaaggtaactggcttcagcagagcgcagataccaaatactgtccttctagtgtagccgtagttaggccaccacttcaagaactctgtagcaccgcctacatacctcgctctgctaatcctgttaccagtggctgctgccagtggcgataagtcgtgtcttaccgggttggactcaagacgatagttaccggataaggcgcagcggtcgggctgaacggggggttcgtgcacacagcccagcttggagcgaacgacctacaccgaactgagatacctacagcgtgagctatgagaaagcgccacgcttcccgaagggagaaaggcggacaggtatccggtaagcggcagggtcggaacaggagagcgcacgagggagcttccagggggaaacgcctggtatctttatagtcctgtcgggtttcgccacctctgacttgagcgtcgatttttgtgatgctcgtcaggggggcggagcctatggaaaaacgccagcaacgcggcctttttacggttcctggccttttgctggccttttgctcacatgttctttcctgcgttatcccctgattctgtggataaccgtattaccgcctttgagtgagctgataccgctcgccgcagccgaacgaccgagcgcagcgagtcagtgagcgaggaagcggaagagcgcccaatacgcaaaccgcctctccccgcgcgttggccgattcattaatgcagaattcc

SEQ ID NO: 912 - protein, 736 aa, Artificial Sequence
  source: /note="Description of Artificial Sequence: Synthetic polypeptide"
  VARIANT (168)..(168): /replace="Arg"
  VARIANT (204)..(204): /replace="Ser"
  VARIANT (266)..(266): /replace="Gly"
  VARIANT (311)..(311): /replace="Lys"
  VARIANT (411)..(411): /replace="Gln"
  VARIANT (460)..(460): /replace="Glu"
  VARIANT (493)..(493): /replace="Thr"
  VARIANT (562)..(562): /replace="Asn"
  VARIANT (576)..(576): /replace="Glu"
  VARIANT (587)..(587): /replace="Ala"
  VARIANT (609)..(609): /replace="Asp
  SITE (1)..(736): /note="Variant residues given in the sequence have no preference with respect to those in the annotations for variant positions"
MAADGYLPDWLEDNLSEGIREWWDLKPGAPKPKANQQKQDDGRGLVLPGYKYLGPFNGLDKGEPVNAADAAALEHDKAYDQQLKAGDNPYLRYNHADAEFQERLQEDTSFGGNLGRAVFQAKKRVLEPLGLVEEGAKTAPGKKRPVEQSPQEPDSSSGIGKKGQQPAKKRLNFGQTGDSESVPDPQPLGEPPAAPSGVGSNTMAAGGGAPMADNNEGADGVGNASGNWHCDSTWLGDRVITTSTRTWALPTYNNHLYKQISSQSGASTNDNTYFGYSTPWGYFDFNRFHCHFSPRDWQRLINNNWGFRPKRLNFKLFNIQVKEVTTNDGTTTIANNLTSTVQVFTDSEYQLPYVLGSAHQGCLPPFPADVFMIPQYGYLTLNNGSQAVGRSSFYCLEYFPSQMLRTGNNFEFSYTFEDVPFHSSYAHSQSLDRLMNPLIDQYLYYLSRTQTTSGTAGNRTLQFSQAGPSSMANQAKNWLPGPCYRQQRVSKTANQNNNSNFAWTGATKYHLNGRDSLVNPGPAMATHKDDEDKFFPMSGVLIFGKQGAGNSNVDLDNVMITSEEEIKTTNPVATEQYGTVATNLQSSNTAPATGTVNSQGALPGMVWQNRDVYLQGPIWAKIPHTDGHFHPSPLMGGFGLKHPPPQILIKNTPVPANPPTTFSPAKFASFITQYSTGQVSVEIEWELQKENSKRWNPEIQYTSNYNKSTNVDFAVDTNGVYSEPRPIGTRYLTRNL

SEQ ID NO: 913 - DNA, 2208 bp, Artificial Sequence
  source: /note="Description of Artificial Sequence: Synthetic polynucleotide"
  variation (502)..(504): /replace="agg"
  variation (610)..(612): /replace="agc"
  variation (796)..(798): /replace="ggc"
  variation (931)..(933): /replace="aag"
  variation (1231)..(1233): /replace="cag"
  variation (1378)..(1380): /replace="gag"
  variation (1477)..(1479): /replace="acc"
  variation (1684)..(1686): /replace="aac"
  variation (1726)..(1728): /replace="gag"
  variation (1759)..(1761): /replace="gcc"
  variation (1825)..(1827): /replace="gac"
  misc_feature (1)..(2208): /note="Variant residues given in the sequence have no preference with respect to those in the annotations for variant positions"
atggctgccgatggttatcttccagattggctcgaggacaacctctctgagggcattcgcgagtggtgggacttgaaacctggagccccgaaacccaaagccaaccagcaaaagcaggacgacggccggggtctggtgcttcctggctacaagtacctcggacccttcaacggactcgacaagggggagcccgtcaacgcggcggacgcagcggccctcgagcacgacaaggcctacgaccagcagctcaaagcgggtgacaatccgtacctgcggtataaccacgccgacgccgagtttcaggagcgtctgcaagaagatacgtcttttgggggcaacctcgggcgagcagtcttccaggccaagaagcgggttctcgaacctctcggtctggttgaggaaggcgctaagacggctcctggaaagaagagaccggtagagcaatcaccccaggaaccagactcctcttcgggcatcggcaagaaaggccagcagcccgcgaagaagagactcaactttgggcagacaggcgactcagagtcagtgcccgaccctcaaccactcggagaaccccccgcagccccctctggtgtgggatctaatacaatggcagcaggcggtggcgctccaatggcagacaataacgaaggcgccgacggagtgggtaacgcctcaggaaattggcattgcgattccacatggctgggcgacagagtcatcaccaccagcacccgaacctgggccctccccacctacaacaaccacctctacaagcaaatctccagccaatcgggagcaagcaccaacgacaacacctacttcggctacagcaccccctgggggtattttgactttaacagattccactgccacttctcaccacgtgactggcagcgactcatcaacaacaactggggattccggcccaagagactcaacttcaagctcttcaacatccaggtcaaggaggtcacgacgaatgatggcaccacgaccatcgccaataaccttaccagcacggttcaggtctttacggactcggaataccagctcccgtacgtcctcggctctgcgcaccagggctgcctgcctccgttcccggcggacgtcttcatgattcctcagtacgggtacctgactctgaacaatggcagtcaggccgtgggccgttcctccttctactgcctggagtactttccttctcaaatgctgagaacgggcaacaactttgagttcagctacacgtttgaggacgtgccttttcacagcagctacgcgcacagccaaagcctggaccggctgatgaaccccctcatcgaccagtacctgtactacctgtctcggactcagaccacgagtggtaccgcaggaaatcggacgttgcaattttctcaggccgggcctagtagcatggcgaatcaggccaaaaactggctacccgggccctgctaccggcagcaacgcgtctccaagacagcgaatcaaaataacaacagcaactttgcctggaccggtgccaccaagtatcatctgaatggcagagactctctggtaaatcccggtcccgctatggcaacccacaaggacgacgaagacaaattttttccgatgagcggagtcttaatatttgggaaacagggagctggaaatagcaacgtggaccttgacaacgttatgataaccagtgaggaagaaattaaaaccaccaacccagtggccacagaacagtacggcacggtggccactaacctgcaatcgtcaaacaccgctcctgctacagggaccgtcaacagtcaaggagccttacctggcatggtctggcagaaccgggacgtgtacctgcagggtcctatctgggccaagattcctcacacggacggacactttcatccctcgccgctgatgggaggctttggactgaaacacccgcctcctcagatcctgattaagaatacacctgttcccgcgaatcctccaactaccttcagtccagctaagtttgcgtcgttcatcacgcagtacagcaccggacaggtcagcgtggaaattgaatgggagctgcagaaagaaaacagcaaacgctggaacccagagattcaatacacttccaactacaacaaatctacaaatgtggactttgctgttgacacaaatggcgtttattctgagcctcgccccatcggcacccgttacctcacccgtaatctg

SEQ ID NO: 914 - protein, 737 aa, Artificial Sequence
  source: /note="Description of Artificial Sequence: Synthetic polypeptide"
  VARIANT (157)..(157): /replace="Ser"
  VARIANT (168)..(168): /replace="Arg"
  VARIANT (262)..(262): /replace="Ser"
  VARIANT (263)..(263): /replace="His"
  VARIANT (312)..(312): /replace="Lys"
  VARIANT (412)..(412): /replace="Gln"
  VARIANT (460)..(460): /replace="Gln"
  VARIANT (461)..(461): /replace="Glu"
  VARIANT (552)..(552): /replace="Ser"
  VARIANT (556)..(556): /replace="Tyr"
  VARIANT (557)..(557): /replace="Ser"
  VARIANT (563)..(563): /replace="Asn"
  VARIANT (580)..(580): /replace="Ile"
  VARIANT (588)..(588): /replace="Ser"
  VARIANT (664)..(664): /replace="Thr
  SITE (1)..(737): /note="Variant residues given in the sequence have no preference with respect to those in the annotations for variant positions"
MAADGYLPDWLEDNLSEGIREWWDLKPGAPKPKANQQKQDDGRGLVLPGYKYLGPFNGLDKGEPVNAADAAALEHDKAYDQQLKAGDNPYLRYNHADAEFQERLQEDTSFGGNLGRAVFQAKKRVLEPLGLVEEGAKTAPGKKRPVEQSPQEPDSSTGIGKKGQQPAKKRLNFGQTGDSESVPDPQPLGEPPAAPSGVGSNTMAAGGGAPMADNNEGADGVGNASGNWHCDSTWLGDRVITTSTRTWALPTYNNHLYKQISNSQSGGSTNDNTYFGYSTPWGYFDFNRFHCHFSPRDWQRLINNNWGFRPKRLNFKLFNIQVKEVTTNDGTTTIANNLTSTVQVFTDSEYQLPYVLGSAHQGCLPPFPADVFMIPQYGYLTLNNGSQAVGRSSFYCLEYFPSQMLRTGNNFEFSYTFEDVPFHSSYAHSQSLDRLMNPLIDQYLYYLSRTQTTGGTAGNRTLQFSQAGPSSMANQAKNWLPGPCYRQQRVSKTTNQNNNSNFAWTGATKYHLNGRDSLVNPGVAMATHKDDEDRFFPSSGVLIFGKQGAGNDNVDLDNVMITSEEEIKTTNPVATEEYGVVATNLQSANTAPQTGTVNSQGALPGMVWQNRDVYLQGPIWAKIPHTDGNFHPSPLMGGFGLKHPPPQILIKNTPVPANPPTTFSPAKFASFITQYSTGQVSVEIEWELQKENSKRWNPEIQYTSNYNKSTNVDFAVDTEGVYSEPRPIGTRYLTRNL

SEQ ID NO: 915 - DNA, 2211 bp, Artificial Sequence
  source: /note="Description of Artificial Sequence: Synthetic polynucleotide"
  variation (469)..(471): /replace="agc"
  variation (502)..(504): /replace="aga"
  variation (784)..(786): /replace="agt"
  variation (787)..(789): /replace="cac"
  variation (934)..(936): /replace="aag"
  variation (1234)..(1236): /replace="cag"
  variation (1378)..(1380): /replace="cag"
  variation (1381)..(1383): /replace="gag"
  variation (1654)..(1656): /replace="agc"
  variation (1666)..(1668): /replace="tac"
  variation (1669)..(1671): /replace="agc"
  variation (1687)..(1689): /replace="aac"
  variation (1738)..(1740): /replace="atc"
  variation (1762)..(1764): /replace="agc"
  variation (1990)..(1992): /replace="acc"
  misc_feature (1)..(2211): /note="Variant residues given in the sequence have no preference with respect to those in the annotations for variant positions"
atggctgccgatggttatcttccagattggctcgaggacaacctctctgagggcattcgcgagtggtgggacttgaaacctggagccccgaaacccaaagccaaccagcaaaagcaggacgacggccggggtctggtgcttcctggctacaagtacctcggacccttcaacggactcgacaagggggagcccgtcaacgcggcggacgcagcggccctcgagcacgacaaggcctacgaccagcagctcaaagcgggtgacaatccgtacctgcggtataaccacgccgacgccgagtttcaggagcgtctgcaagaagatacgtcttttgggggcaacctcgggcgagcagtcttccaggccaagaagcgggttctcgaacctctcggtctggttgaggaaggcgctaagacggctcctggaaagaagagaccggtagagcaatcaccccaggaaccagactcctctacgggcatcggcaagaaaggccagcagcccgcgaaaaagagactcaactttgggcagactggcgactcagagtcagtgcccgaccctcaaccactcggagaaccccccgcagccccctctggtgtgggatctaatacaatggctgcaggcggtggcgctccaatggcagacaataacgaaggcgccgacggagtgggtaatgcctcaggaaattggcattgcgattccacatggctgggcgacagagtcatcaccaccagcacccgaacctgggccctccccacctacaacaaccacctctacaagcaaatctccaacagccaatcgggaggaagcaccaacgacaacacctacttcggctacagcaccccctgggggtattttgactttaacagattccactgccacttctcaccacgtgactggcagcgactcatcaacaacaactggggattccggcccaagagactcaacttcaagctcttcaacatccaggtcaaggaggtcacgacgaatgatggcaccacgaccatcgccaataaccttaccagcacggttcaggtctttacggactcggaataccagctcccgtacgtcctcggctctgcgcaccagggctgcctgcctccgttcccggcggacgtcttcatgattcctcagtacgggtacctgactctgaacaatggcagtcaggccgtgggccgttcctccttctactgcctggagtactttccttctcaaatgctgagaacgggcaacaactttgagttcagctacacgtttgaggacgtgccttttcacagcagctacgcgcacagccaaagcctggaccggctgatgaaccccctcatcgaccagtacctgtactacctgtctcggactcagaccacgggaggtaccgcaggaaatcggacgttgcaattttctcaggccgggcctagtagcatggcgaatcaggccaaaaactggctacccgggccctgctaccggcagcaacgcgtctccaagacaacgaatcaaaataacaacagcaactttgcctggaccggtgccaccaagtatcatctgaatggcagagactctctggtaaatcccggtgtcgctatggcaacccacaaggacgacgaagaccgattttttccgtccagcggagtcttaatatttgggaaacagggagctggaaatgacaacgtggaccttgacaacgttatgataaccagtgaggaagaaattaaaaccaccaacccagtggccacagaagagtacggcgtggtggccactaacctgcaatcggcaaacaccgctcctcaaacagggaccgtcaacagtcaaggagccttacctggcatggtctggcagaaccgggacgtgtacctgcagggtcctatctgggccaagattcctcacacggacggaaactttcatccctcgccgctgatgggaggctttggactgaaacacccgcctcctcagatcctgattaagaatacacctgttcccgcgaatcctccaactaccttcagtccagctaagtttgcgtcgttcatcacgcagtacagcaccggacaggtcagcgtggaaattgaatgggagctgcagaaagaaaacagcaaacgctggaacccagagattcaatacacttccaactacaacaaatctacaaatgtggactttgctgttgacacagaaggcgtttattctgagcctcgccccatcggcacccgttacctcacccgtaatctg

SEQ ID NO: 916 - protein, 738 aa, Artificial Sequence
  source: /note="Description of Artificial Sequence: Synthetic polypeptide"
  VARIANT (158)..(158): /replace="Ser"
  VARIANT (169)..(169): /replace="Arg"
  VARIANT (564)..(564): /replace="Asn
  SITE (1)..(738): /note="Variant residues given in the sequence have no preference with respect to those in the annotations for variant positions"
MAADGYLPDWLEDNLSEGIREWWDLKPGAPKPKANQQKQDDGRGLVLPGYKYLGPFNGLDKGEPVNAADAAALEHDKAYDQQLKAGDNPYLRYNHADAEFQERLQEDTSFGGNLGRAVFQAKKRVLEPLGLVEEGAKTAPGKKRPVEQSPQREPDSSTGIGKKGQQPAKKRLNFGQTGDSESVPDPQPLGEPPAAPSGVGSNTMAAGGGAPMADNNEGADGVGNSSGNWHCDSTWLGDRVITTSTRTWALPTYNNHLYKQISNGTSGGSTNDNTYFGYSTPWGYFDFNRFHCHFSPRDWQRLINNNWGFRPKRLNFKLFNIQVKEVTTNEGTKTIANNLTSTVQVFTDSEYQLPYVLGSAHQGCLPPFPADVFMIPQYGYLTLNNGSQAVGRSSFYCLEYFPSQMLRTGNNFQFSYTFEDVPFHSSYAHSQSLDRLMNPLIDQYLYYLSRTQTTGGTAGTQTLQFSQAGPSSMANQAKNWLPGPCYRQQRVSTTTNQNNNSNFAWTGATKYHLNGRDSLVNPGVAMATHKDDEDRFFPSSGVLIFGKQGAGNDNVDYSNVMITSEEEIKTTNPVATEEYGVVATNLQSANTAPQTGTVNSQGALPGMVWQNRDVYLQGPIWAKIPHTDGNFHPSPLMGGFGLKHPPPQILIKNTPVPADPPTTFNQAKLNSFITQYSTGQVSVEIEWELQKENSKRWNPEIQYTSNYYKSTNVDFAVNTEGVYSEPRPIGTRYLTRNL

SEQ ID NO: 917 - DNA, 2214 bp, Artificial Sequence
  source: /note="Description of Artificial Sequence: Synthetic polynucleotide"
  variation (472)..(474): /replace="agc"
  variation (505)..(507): /replace="aga"
  variation (1690)..(1692): /replace="aac"
  misc_feature (1)..(2214): /note="Variant residues given in the sequence have no preference with respect to those in the annotations for variant positions"
atggctgccgatggttatcttccagattggctcgaggacaacctctctgagggcattcgcgagtggtgggacctgaaacctggagccccgaaacccaaagccaaccagcaaaagcaggacgacggccggggtctggtgcttcctggctacaagtacctcggacccttcaacggactcgacaagggggagcccgtcaacgcggcggacgcagcggccctcgagcacgacaaggcctacgaccagcagctcaaagcgggtgacaatccgtacctgcggtataatcacgccgacgccgagtttcaggagcgtctgcaagaagatacgtcttttgggggcaacctcgggcgagcagtcttccaggccaagaagcgggttctcgaacctctcggtctggttgaggaaggcgctaagacggctcctggaaagaagagaccggtagagcagtcaccacagcgtgagcccgactcctccacgggcatcggcaagaaaggccagcagcccgccaaaaagagactcaatttcggtcagactggcgactcagagtcagtccccgaccctcaacctctcggagaacctccagcagcgccctctggtgtgggatctaatacaatggctgcaggcggtggcgcaccaatggcagacaataacgaaggtgccgacggagtgggtaattcctcgggaaattggcattgcgattccacatggctgggcgacagagtcatcaccaccagcacccgaacctgggccctgcccacctacaacaaccacctctacaagcaaatctccaacgggacctcgggaggcagcaccaacgacaacacctactttggctacagcaccccctgggggtattttgactttaacagattccactgccacttctcaccacgtgactggcagcgactcatcaacaacaactggggattccggcccaagagactcaacttcaagctcttcaacatccaggtcaaagaggtcacgacgaatgaaggcaccaagaccatcgccaataacctcaccagcaccgtccaggtgtttacggactcggaataccagctgccgtacgtcctcggctctgcccaccagggctgcctgcctccgttcccggcggacgtcttcatgattcctcagtacggctacctgactctcaacaacggtagtcaggccgtgggacgttcctccttctactgcctggagtacttcccctctcagatgctgagaacgggcaacaactttcaattcagctacactttcgaggacgtgcctttccacagcagctacgcgcacagccagagtttggacaggctgatgaatcctctcatcgaccagtacctgtactacctgtcaagaacccagactacgggaggcacagcgggaacccagacgttgcagttttctcaggccgggcctagcagcatggcgaatcaggccaaaaactggctgcctggaccctgctacagacagcagcgcgtctccacgacaacgaatcaaaacaacaacagcaactttgcctggactggtgccaccaagtatcatctgaacggcagagactctctggtgaatccgggcgtcgccatggcaacccacaaggacgacgaggaccgcttcttcccatccagcggcgtcctcatatttggcaagcagggagctggaaatgacaacgtggactatagcaacgtgatgataaccagcgaggaagaaatcaagaccaccaaccccgtggccacagaagagtatggcgtggtggctactaacctacagtcggcaaacaccgctcctcaaacggggaccgtcaacagccagggagccttacctggcatggtctggcagaaccgggacgtgtacctgcagggtcctatttgggccaagattcctcacacagatggcaactttcacccgtctcctttaatgggcggctttggacttaaacatccgcctcctcagatcctcatcaaaaacactcctgttcctgcggatcctccaacaacgttcaaccaggccaagctgaattctttcatcacgcagtacagcaccggacaagtcagcgtggagatcgagtgggagctgcagaaggagaacagcaagcgctggaacccagagattcagtatacttccaactactacaaatctacaaatgtggactttgctgttaatactgagggtgtttactctgagcctcgccccattggcactcgttacctcacccgtaatctg

SEQ ID NO: 918 - protein, 738 aa, Artificial Sequence
  source: /note="Description of Artificial Sequence: Synthetic polypeptide"
  VARIANT (158)..(158): /replace="Ser"
  VARIANT (169)..(169): /replace="Lys"
  VARIANT (315)..(315): /replace="Ser"
  VARIANT (413)..(413): /replace="Glu"
  VARIANT (472)..(472): /replace="Thr" or "Ser"
  VARIANT (534)..(534): /replace="Glu"
  VARIANT (542)..(542): /replace="Val"
  VARIANT (595)..(595): /replace="Val
  SITE (1)..(738): /note="Variant residues given in the sequence have no preference with respect to those in the annotations for variant positions"
MAADGYLPDWLEDNLSEGIREWWDLKPGAPKPKANQQKQDDGRGLVLPGYKYLGPFNGLDKGEPVNAADAAALEHDKAYDQQLKAGDNPYLRYNHADAEFQERLQEDTSFGGNLGRAVFQAKKRVLEPLGLVEEGAKTAPGKKRPVEQSPQREPDSSTGIGKKGQQPARKRLNFGQTGDSESVPDPQPLGEPPAAPSGVGSNTMAAGGGAPMADNNEGADGVGSSSGNWHCDSTWLGDRVITTSTRTWALPTYNNHLYKQISNGTSGGSTNDNTYFGYSTPWGYFDFNRFHCHFSPRDWQRLINNNWGFRPKRLNFKLFNIQVKEVTQNEGTKTIANNLTSTIQVFTDSEYQLPYVLGSAHQGCLPPFPADVFMIPQYGYLTLNNGSQAVGRSSFYCLEYFPSQMLRTGNNFQFSYTFEDVPFHSSYAHSQSLDRLMNPLIDQYLYYLSRTQTTGGTAGTQTLQFSQAGPSNMANQAKNWLPGPCYRQQRVSTTTSQNNNSNFAWTGATKYHLNGRDSLVNPGVAMATHKDDEDRFFPSSGILIFGKQGAGKDNVDYSNVMLTSEEEIKTTNPVATEEYGVVADNLQQQNTAPQIGTVNSQGALPGMVWQNRDVYLQGPIWAKIPHTDGNFHPSPLMGGFGLKHPPPQILIKNTPVPADPPTTFNQAKLNSFITQYSTGQVSVEIEWELQKENSKRWNPEIQYTSNYYKSTNVDFAVNTEGVYSEPRPIGTRYLTRNL

SEQ ID NO: 919 - DNA, 2214 bp, Artificial Sequence
  source: /note="Description of Artificial Sequence: Synthetic polynucleotide"
  variation (472)..(474): /replace="agc"
  variation (505)..(507): /replace="aag"
  variation (943)..(945): /replace="agc"
  variation (1237)..(1239): /replace="gaa"
  variation (1414)..(1416): /replace="aac" or "agc"
  variation (1600)..(1602): /replace="gag"
  variation (1624)..(1626): /replace="gtc"
  variation (1783)..(1785): /replace="gta"
  misc_feature (1)..(2214): /note="Variant residues given in the sequence have no preference with respect to those in the annotations for variant positions"
atggctgccgatggttatcttccagattggctcgaggacaacctctctgagggcattcgcgagtggtgggacctgaaacctggagccccgaaacccaaagccaaccagcaaaagcaggacgacggccggggtctggtgcttcctggctacaagtacctcggacccttcaacggactcgacaagggggagcccgtcaacgcggcggacgcagcggccctcgagcacgacaaggcctacgaccagcagctcaaagcgggtgacaatccgtacctgcggtataatcacgccgacgccgagtttcaggagcgtctgcaagaagatacgtcttttgggggcaacctcgggcgagcagtcttccaggccaagaagcgggttctcgaacctctcggtctggttgaggaaggcgctaagacggctcctggaaagaagagaccggtagagcagtcaccacagcgtgagcccgactcctccacgggcatcggcaagaaaggccagcagcccgccagaaagagactcaatttcggtcagactggcgactcagagtcagtccccgaccctcaacctctcggagaacctccagcagcgccctctggtgtgggatctaatacaatggctgcaggcggtggcgcaccaatggcagacaataacgaaggtgccgacggagtgggtagttcctcgggaaattggcattgcgattccacatggctgggcgacagagtcatcaccaccagcacccgaacctgggccctgcccacctacaacaaccacctctacaagcaaatctccaacgggacctcgggaggcagcaccaacgacaacacctactttggctacagcaccccctgggggtattttgactttaacagattccactgccacttctcaccacgtgactggcagcgactcatcaacaacaactggggattccggcccaagagactcaacttcaagctcttcaacatccaggtcaaagaggtcacgcagaatgaaggcaccaagaccatcgccaataacctcaccagcaccatccaggtgtttacggactcggaataccagctgccgtacgtcctcggctctgcccaccagggctgcctgcctccgttcccggcggacgtcttcatgattcctcagtacggctacctgactctcaacaacggtagtcaggccgtgggacgttcctccttctactgcctggagtacttcccctctcagatgctgagaacgggcaacaactttcaattcagctacactttcgaggacgtgcctttccacagcagctacgcgcacagccagagtttggacaggctgatgaatcctctcatcgaccagtacctgtactacctgtcaagaacccagactacgggaggcacagcgggaacccagacgttgcagttttctcaggccgggcctagcaccatggcgaatcaggccaaaaactggctgcctggaccctgctacagacagcagcgcgtctccacgacaacgtcgcaaaacaacaacagcaactttgcctggactggtgccaccaagtatcatctgaacggcagagactctctggtgaatccgggcgtcgccatggcaacccacaaggacgacgaggaccgcttcttcccatccagcggcatcctcatatttggcaagcagggagctggaaaagacaacgtggactatagcaacgtgatgctaaccagcgaggaagaaatcaagaccaccaaccccgtggccacagaagagtatggcgtggtggctgataacctacagcagcaaaacaccgctcctcaaatagggaccgtcaacagccagggagccttacctggcatggtctggcagaaccgggacgtgtacctgcagggtcctatttgggccaagattcctcacacagatggcaactttcacccgtctcctttaatgggcggctttggacttaaacatccgcctcctcagatcctcatcaaaaacactcctgttcctgcggatcctccaacaacgttcaaccaggccaagctgaattctttcatcacgcagtacagcaccggacaagtcagcgtggagatcgagtgggagctgcagaaggagaacagcaagcgctggaacccagagattcagtatacttccaactactacaaatctacaaatgtggactttgctgttaatactgagggtgtttactctgagcctcgccccattggcactcgttacctcacccgtaatctg

SEQ ID NO: 920 - protein, 738 aa, Artificial Sequence
  source: /note="Description of Artificial Sequence: Synthetic polypeptide"
  VARIANT (169)..(169): /replace="Lys"
  VARIANT (315)..(315): /replace="Ser"
  VARIANT (534)..(534): /replace="Glu"
  VARIANT (542)..(542): /replace="Val
  SITE (1)..(738): /note="Variant residues given in the sequence have no preference with respect to those in the annotations for variant positions"
MAADGYLPDWLEDNLSEGIREWWDLKPGAPKPKANQQKQDDGRGLVLPGYKYLGPFNGLDKGEPVNAADAAALEHDKAYDQQLKAGDNPYLRYNHADAEFQERLQEDTSFGGNLGRAVFQAKKRVLEPLGLVEEGAKTAPGKKRPVEPSPQRSPDSSTGIGKKGQQPARKRLNFGQTGDSESVPDPQPIGEPPAAPSGVGSGTMAAGGGAPMADNNEGADGVGSSSGNWHCDSTWLGDRVITTSTRTWALPTYNNHLYKQISNGTSGGSTNDNTYFGYSTPWGYFDFNRFHCHFSPRDWQRLINNNWGFRPKRLNFKLFNIQVKEVTQNEGTKTIANNLTSTIQVFTDSEYQLPYVLGSAHQGCLPPFPADVFMIPQYGYLTLNNGSQAVGRSSFYCLEYFPSQMLRTGNNFEFSYTFEDVPFHSSYAHSQSLDRLMNPLIDQYLYYLSRTQSTGGTAGTQQLLFSQAGPSNMSAQAKNWLPGPCYRQQRVSTTLSQNNNSNFAWTGATKYHLNGRDSLVNPGVAMATHKDDEDRFFPSSGILMFGKQGAGKDNVDYSNVMLTSEEEIKTTNPVATEQYGVVADNLQQQNTAPIVGAVNSQGALPGMVWQNRDVYLQGPIWAKIPHTDGNFHPSPLMGGFGLKHPPPQILIKNTPVPADPPTTFNQAKLNSFITQYSTGQVSVEIEWELQKENSKRWNPEIQYTSNYYKSTNVDFAVNTEGVYSEPRPIGTRYLTRNL

SEQ ID NO: 921 - DNA, 2214 bp, Artificial Sequence
  source: /note="Description of Artificial Sequence: Synthetic polynucleotide"
  variation (505)..(507): /replace="aaa"
  variation (943)..(945): /replace="agc"
  variation (1600)..(1602): /replace="gag"
  variation (1624)..(1626): /replace="gtc"
  misc_feature (1)..(2214): /note="Variant residues given in the sequence have no preference with respect to those in the annotations for variant positions"
atggctgccgatggttatcttccagattggctcgaggacaacctctctgagggcattcgcgagtggtgggacctgaaacctggagccccgaaacccaaagccaaccagcaaaagcaggacgacggccggggtctggtgcttcctggctacaagtacctcggacccttcaacggactcgacaagggggagcccgtcaacgcggcggacgcagcggccctcgagcacgacaaggcctacgaccagcagctcaaagcgggtgacaatccgtacctgcggtataatcacgccgacgccgagtttcaggagcgtctgcaagaagatacgtcttttgggggcaacctcgggcgagcagtcttccaggccaagaagcgggttctcgaacctctcggtctggttgaggaaggcgctaagacggctcctggaaagaagagaccggtagagccgtcaccacagcgttcccccgactcctccacgggcatcggcaagaaaggccagcagcccgccagaaagagactcaatttcggtcagactggcgactcagagtcagtccccgaccctcaacctatcggagaacctccagcagcgccctctggtgtgggatctggtacaatggctgcaggcggtggcgcaccaatggcagacaataacgaaggtgccgacggagtgggtagttcctcgggaaattggcattgcgattccacatggctgggcgacagagtcatcaccaccagcacccgaacctgggccctgcccacctacaacaaccacctctacaagcaaatctccaacgggacctcgggaggcagcaccaacgacaacacctactttggctacagcaccccctgggggtattttgactttaacagattccactgccacttctcaccacgtgactggcagcgactcatcaacaacaactggggattccggcccaagagactcaacttcaagctcttcaacatccaggtcaaagaggtcacgcagaatgaaggcaccaagaccatcgccaataacctcaccagcaccatccaggtgtttacggactcggaataccagctgccgtacgtcctcggctctgcccaccagggctgcctgcctccgttcccggcggacgtcttcatgattcctcagtacggctacctgactctcaacaacggtagtcaggccgtgggacgttcctccttctactgcctggagtacttcccctctcagatgctgagaacgggcaacaactttgagttcagctacactttcgaggacgtgcctttccacagcagctacgcgcacagccagagtttggacaggctgatgaatcctctcatcgaccagtacctgtactacctgtcaagaacccagtctacgggaggcacagcgggaacccagcagttgctgttttctcaggccgggcctagcaacatgtcggctcaggccaaaaactggctgcctggaccctgctacagacagcagcgcgtctccacgacactgtcgcaaaacaacaacagcaactttgcctggactggtgccaccaagtatcatctgaacggcagagactctctggtgaatccgggcgtcgccatggcaacccacaaggacgacgaggaccgcttcttcccatccagcggcatcctcatgtttggcaagcagggagctggaaaagacaacgtggactatagcaacgtgatgctaaccagcgaggaagaaatcaagaccaccaaccccgtggccacagaacagtatggcgtggtggctgataacctacagcagcaaaacaccgctcctattgtgggggccgtcaacagccagggagccttacctggcatggtctggcagaaccgggacgtgtacctgcagggtcctatttgggccaagattcctcacacagatggcaactttcacccgtctcctttaatgggcggctttggacttaaacatccgcctcctcagatcctcatcaaaaacactcctgttcctgcggatcctccaacaacgttcaaccaggccaagctgaattctttcatcacgcagtacagcaccggacaagtcagcgtggagatcgagtgggagctgcagaaggagaacagcaagcgctggaacccagagattcagtatacttccaactactacaaatctacaaatgtggactttgctgttaatactgagggtgtttactctgagcctcgccccattggcactcgttacctcacccgtaatctg

SEQ ID NO: 922 - protein, 738 aa, Artificial Sequence
  source: /note="Description of Artificial Sequence: Synthetic polypeptide"
  VARIANT (471)..(471): /replace="Asn
  SITE (1)..(738): /note="Variant residues given in the sequence have no preference with respect to those in the annotations for variant positions"
MAADGYLPDWLEDNLSEGIREWWDLKPGAPKPKANQQKQDDGRGLVLPGYKYLGPFNGLDKGEPVNAADAAALEHDKAYDQQLKAGDNPYLRYNHADAEFQERLQEDTSFGGNLGRAVFQAKKRVLEPLGLVEEGAKTAPGKKRPVEPSPQRSPDSSTGIGKKGQQPAKKRLNFGQTGDSESVPDPQPIGEPPAGPSGLGSGTMAAGGGAPMADNNEGADGVGSSSGNWHCDSTWLGDRVITTSTRTWALPTYNNHLYKQISNGTSGGSTNDNTYFGYSTPWGYFDFNRFHCHFSPRDWQRLINNNWGFRPKRLNFKLFNIQVKEVTQNEGTKTIANNLTSTIQVFTDSEYQLPYVLGSAHQGCLPPFPADVFMIPQYGYLTLNNGSQAVGRSSFYCLEYFPSQMLRTGNNFEFSYTFEDVPFHSSYAHSQSLDRLMNPLIDQYLYYLSRTQSTGGTAGTQQLLFSQAGPSNMSAQAKNWLPGPCYRQQRVSTTLSQNNNSNFAWTGATKYHLNGRDSLVNPGVAMATHKDDEERFFPSSGVLMFGKQGAGKDNVDYSSVMLTSEEEIKTTNPVATEQYGVVADNLQQQNTAPIVGAVNSQGALPGMVWQNRDVYLQGPIWAKIPHTDGNFHPSPLMGGFGLKHPPPQILIKNTPVPADPPTTFSQAKLASFITQYSTGQVSVEIEWELQKENSKRWNPEIQYTSNYYKSTNVDFAVNTEGTYSEPRPIGTRYLTRNL

SEQ ID NO: 923 - DNA, 2214 bp, Artificial Sequence
  source: /note="Description of Artificial Sequence: Synthetic polynucleotide"
  variation (1411)..(1413): /replace="aat"
  misc_feature (1)..(2214): /note="Variant residues given in the sequence have no preference with respect to those in the annotations for variant positions"
atggctgccgatggttatcttccagattggctcgaggacaacctctctgagggcattcgcgagtggtgggacttgaaacctggagccccgaaacccaaagccaaccagcaaaagcaggacgacggccggggtctggtgcttcctggctacaagtacctcggacccttcaacggactcgacaagggggagcccgtcaacgcggcggacgcagcggccctcgagcacgacaaggcctacgaccagcagctcaaagcgggtgacaatccgtacctgcggtataaccacgccgacgccgagtttcaggagcgtctgcaagaagatacgtcttttgggggcaacctcgggcgagcagtcttccaggccaagaagcgggttctcgaacctctcggtctggttgaggaaggcgctaagacggctcctggaaagaagagaccggtagagccatcaccccagcgttctccagactcctctacgggcatcggcaagaaaggccagcagcccgcgaaaaagagactcaactttgggcagactggcgactcagagtcagtgcccgaccctcaaccaatcggagaaccccccgcaggcccctctggtctgggatctggtacaatggctgcaggcggtggcgctccaatggcagacaataacgaaggcgccgacggagtgggtagttcctcaggaaattggcattgcgattccacatggctgggcgacagagtcatcaccaccagcacccgaacctgggccctccccacctacaacaaccacctctacaagcaaatctccaacgggacttcgggaggaagcaccaacgacaacacctacttcggctacagcaccccctgggggtattttgactttaacagattccactgccacttctcaccacgtgactggcagcgactcatcaacaacaactggggattccggcccaagagactcaacttcaagctcttcaacatccaggtcaaggaggtcacgcagaatgaaggcaccaagaccatcgccaataaccttaccagcacgattcaggtctttacggactcggaataccagctcccgtacgtcctcggctctgcgcaccagggctgcctgcctccgttcccggcggacgtcttcatgattcctcagtacgggtacctgactctgaacaatggcagtcaggccgtgggccgttcctccttctactgcctggagtactttccttctcaaatgctgagaacgggcaacaactttgagttcagctacacgtttgaggacgtgccttttcacagcagctacgcgcacagccaaagcctggaccggctgatgaaccccctcatcgaccagtacctgtactacctgtctcggactcagtccacgggaggtaccgcaggaactcagcagttgctattttctcaggccgggcctagtaacatgtcggctcaggccaaaaactggctacccgggccctgctaccggcagcaacgcgtctccacgacactgtcgcaaaataacaacagcaactttgcctggaccggtgccaccaagtatcatctgaatggcagagactctctggtaaatcccggtgtcgctatggcaacccacaaggacgacgaagagcgattttttccgtccagcggagtcttaatgtttgggaaacagggagctggaaaagacaacgtggactatagcagcgttatgctaaccagtgaggaagaaattaaaaccaccaacccagtggccacagaacagtacggcgtggtggccgataacctgcaacagcaaaacaccgctcctattgtaggggccgtcaacagtcaaggagccttacctggcatggtctggcagaaccgggacgtgtacctgcagggtcctatctgggccaagattcctcacacggacggaaactttcatccctcgccgctgatgggaggctttggactgaaacacccgcctcctcagatcctgattaagaatacacctgttcccgcggatcctccaactaccttcagtcaagctaagctggcgtcgttcatcacgcagtacagcaccggacaggtcagcgtggaaattgaatgggagctgcagaaagaaaacagcaaacgctggaacccagagattcaatacacttccaactactacaaatctacaaatgtggactttgctgttaacacagaaggcacttattctgagcctcgccccatcggcacccgttacctcacccgtaatctg

SEQ ID NO: 924 - protein, 737 aa, Artificial Sequence
  source: /note="Description of Artificial Sequence: Synthetic polypeptide"
  VARIANT (148)..(148): /replace="Gln"
  VARIANT (169)..(169): /replace="Arg"
  VARIANT (314)..(314): /replace="Asn"
  VARIANT (466)..(466): /replace="His"
  VARIANT (563)..(563): /replace="Ser"
  VARIANT (580)..(580): /replace="Ile"
  VARIANT (588)..(588): /replace="Ser
  SITE (1)..(737): /note="Variant residues given in the sequence have no preference with respect to those in the annotations for variant positions"
MAADGYLPDWLEDNLSEGIREWWDLKPGAPKPKANQQKQDDGRGLVLPGYKYLGPFNGLDKGEPVNAADAAALEHDKAYDQQLKAGDNPYLRYNHADAEFQERLQEDTSFGGNLGRAVFQAKKRVLEPLGLVEEGAKTAPGKKRPVEPSPQRSPDSSTGIGKKGQQPAKKRLNFGQTGDSESVPDPQPLGEPPAAPSGVGSGTMAAGGGAPMADNNEGADGVGNASGNWHCDSTWLGDRVITTSTRTWALPTYNNHLYKQISSQSAGSTNDNTYFGYSTPWGYFDFNRFHCHFSPRDWQRLINNNWGFRPKKLRFKLFNIQVKEVTTNDGVTTIANNLTSTVQVFSDSEYQLPYVLGSAHQGCLPPFPADVFMIPQYGYLTLNNGSQSVGRSSFYCLEYFPSQMLRTGNNFEFSYTFEDVPFHSSYAHSQSLDRLMNPLIDQYLYYLARTQSTTGGTAGNRELQFYQAGPSTMAEQAKNWLPGPCYRQQRVSKTLDQNNNSNFAWTGATKYHLNGRNSLVNPGVAMATHKDDEDRFFPSSGVLIFGKTGAANKTTLENVLMTNEEEIKTTNPVATEEYGVVSSNLQSANTAPQTQTVNSQGALPGMVWQNRDVYLQGPIWAKIPHTDGNFHPSPLMGGFGLKHPPPQILIKNTPVPANPPEVFTPAKFASFITQYSTGQVSVEIEWELQKENSKRWNPEIQYTSNYDKSTNVDFAVDSEGVYSEPRPIGTRYLTRNL

SEQ ID NO: 925 - DNA, 2211 bp, Artificial Sequence
  source: /note="Description of Artificial Sequence: Synthetic polynucleotide"
  variation (442)..(444): /replace="cag"
  variation (505)..(507): /replace="aga"
  variation (940)..(942): /replace="aac"
  variation (1396)..(1398): /replace="cac"
  variation (1687)..(1689): /replace="agt"
  variation (1738)..(1740): /replace="ata"
  variation (1762)..(1764): /replace="tct"
  misc_feature (1)..(2211): /note="Variant residues given in the sequence have no preference with respect to those in the annotations for variant positions"
atggctgccgatggttatcttccagattggctcgaggacaacctctctgagggcattcgcgagtggtgggacctgaaacctggagccccgaaacccaaagccaaccagcaaaagcaggacgacggccggggtctggtgcttcctggctacaagtacctcggacccttcaacggactcgacaagggggagcccgtcaacgcggcggacgcagcggccctcgagcacgacaaggcctacgaccagcagctcaaagcgggtgacaatccgtacctgcggtataaccacgccgacgccgagtttcaggagcgtctgcaagaagatacgtcatttgggggcaacctcgggcgagcagtcttccaggccaagaagcgggttctcgaacctctcggtctggttgaggaaggcgctaagacggctcctggaaagaagagaccggtagagccgtcacctcagcgttcccccgactcctccacgggcatcggcaagaaaggccagcagcccgccaaaaagagactcaatttcggtcagactggcgactcagagtcagtccccgaccctcaacctctcggagaacctccagcagcgccctctggtgtgggatctggtacaatggctgcaggcggtggcgcaccaatggcagacaataacgaaggtgccgacggagtgggtaatgcctcaggaaattggcattgcgattccacatggctgggcgacagagtcattaccaccagcacccgaacctgggccctgcccacctacaacaaccacctctacaagcaaatctccagtcaaagtgcaggtagtaccaacgacaacacctacttcggctacagcaccccctgggggtattttgactttaacagattccactgccacttctcaccacgtgactggcagcgactcatcaacaacaactggggattccggcccaagaagctgcggttcaagctcttcaacatccaggtcaaggaggtcacgacgaatgacggcgttacgaccatcgctaataaccttaccagcacggttcaggtattctcggactcggaataccagctgccgtacgtcctcggctctgcgcaccagggctgcctgcctccgttcccggcggacgtcttcatgattcctcagtacggctacctgactctcaacaatggcagtcagtctgtgggacgttcctccttctactgcctggagtacttcccctctcagatgctgagaacgggcaacaactttgagttcagctacaccttcgaggacgtgcctttccacagcagctacgcacacagccagagcctggaccggctgatgaatcccctcatcgaccagtacttgtactacctggccagaacacagagtaccacaggaggcacagctggcaatcgggaactgcagttttaccaggccgggccttcaactatggccgaacaagccaagaattggttacctggaccttgctaccggcaacaaagagtctccaaaacgctggatcaaaacaacaacagcaactttgcttggactggtgccaccaaatatcacctgaacggcagaaactcgttggttaatcccggcgtcgccatggcaactcacaaggacgacgaggaccgctttttcccatccagcggagtcctgatttttggaaaaactggagcagctaacaaaactacattggaaaatgtgttaatgacaaatgaagaagaaattaaaactactaatcctgtagccacggaagaatacggggtagtcagcagcaacttacaatcggctaatactgcaccccagacacaaactgtcaacagccagggagccttacctggcatggtctggcagaaccgggacgtgtacctgcagggtcccatctgggccaagattcctcacacggatggcaactttcacccgtctcctttgatgggcggctttggacttaaacatccgcctcctcagatcctgatcaagaacactcccgttcccgctaatcctccggaggtgtttactcctgccaagtttgcttcgttcatcacacagtacagcaccggacaagtcagcgtggaaatcgagtgggagctgcagaaggaaaacagcaagcgctggaacccggagattcagtacacctccaactatgataagtcgactaatgtggactttgccgttgacagcgagggtgtttactctgagcctcgccctattggcactcgttacctcacccgtaatctg

SEQ ID NO: 926 - protein, 735 aa, Artificial Sequence
  source: /note="Description of Artificial Sequence: Synthetic polypeptide"
  VARIANT (162)..(162): /replace="Thr"
  VARIANT (168)..(168): /replace="Arg"
  VARIANT (224)..(224): /replace="Ser"
  VARIANT (310)..(310): /replace="Lys"
  VARIANT (410)..(410): /replace="Gln"
  VARIANT (446)..(446): /replace="Asn"
  VARIANT (461)..(461): /replace="Leu"
  VARIANT (471)..(471): /replace="Ser"
  VARIANT (708)..(708): /replace="Thr
  SITE (1)..(735): /note="Variant residues given in the sequence have no preference with respect to those in the annotations for variant positions"
MAADGYLPDWLEDNLSEGIREWWDLKPGAPKPKANQQKQDDGRGLVLPGYKYLGPFNGLDKGEPVNAADAAALEHDKAYDQQLKAGDNPYLRYNHADAEFQERLQEDTSFGGNLGRAVFQAKKRVLEPLGLVEEGAKTAPGKKRPVEQSPQEPDSSSGIGKSGQQPAKKRLNFGQTGDSESVPDPQPLGEPPAAPSGVGSNTMASGGGAPMADNNEGADGVGNASGNWHCDSTWLGDRVITTSTRTWALPTYNNHLYKQISSQSGASNDNHYFGYSTPWGYFDFNRFHCHFSPRDWQRLINNNWGFRPKRLNFKLFNIQVKEVTTNDGTTTIANNLTSTVQVFTDSEYQLPYVLGSAHQGCLPPFPADVFMIPQYGYLTLNNGSQAVGRSSFYCLEYFPSQMLRTGNNFTFSYTFEDVPFHSSYAHSQSLDRLMNPLIDQYLYYLSRTQTTSGTAQNRELQFSQAGPSSMANQAKNWLPGPCYRQQRVSKTANDNNNSNFAWTGATKYHLNGRDSLVNPGPAMASHKDDEDKFFPMSGVLIFGKQGAGASNVDLDNVMITDEEEIKTTNPVATEQYGTVATNLQSSNTAPATGTVNSQGALPGMVWQDRDVYLQGPIWAKIPHTDGHFHPSPLMGGFGLKHPPPQILIKNTPVPANPPTTFSPAKFASFITQYSTGQVSVEIEWELQKENSKRWNPEIQYTSNYNKSANVDFTVDTNGVYSEPRPIGTRYLTRNL

SEQ ID NO: 927 - DNA, 2205 bp, Artificial Sequence
  source: /note="Description of Artificial Sequence: Synthetic polynucleotide"
  variation (484)..(486): /replace="aca"
  variation (502)..(504): /replace="aga"
  variation (670)..(672): /replace="tcc"
  variation (928)..(930): /replace="aaa"
  variation (1228)..(1230): /replace="cag"
  variation (1336)..(1338): /replace="aac"
  variation (1381)..(1383): /replace="ctg"
  variation (1411)..(1413): /replace="tct"
  variation (2122)..(2124): /replace="acc"
  misc_feature (1)..(2205): /note="Variant residues given in the sequence have no preference with respect to those in the annotations for variant positions"
atggctgccgatggttatcttccagattggctcgaggacaacctctctgagggcattcgcgagtggtgggacttgaaacctggagccccgaaacccaaagccaaccagcaaaagcaggacgacggccggggtctggtgcttcctggctacaagtacctcggacccttcaacggactcgacaagggggagcccgtcaacgcggcggatgcagcggccctcgagcacgacaaggcctacgaccagcagctcaaagcgggtgacaatccgtacctgcggtataaccacgccgacgccgagtttcaggagcgtctgcaagaagatacgtcttttgggggcaacctcgggcgagcagtcttccaggccaagaagagggttctcgaacctcttggtctggttgaggaaggtgctaagacggctcctggaaagaaacgtccggtagagcagtcgccacaagagccagactcctcctcgggcattggcaagtcaggccagcagcccgctaaaaagagactcaattttggtcagactggcgactcagagtcagtccccgacccacaacctctcggagaacctccagcagccccctctggtgtgggatctaatacaatggcttcaggcggtggcgcaccaatggcagacaataacgaaggcgccgacggagtgggtaatgcctcaggaaattggcattgcgattccacatggctgggcgacagagtcatcaccaccagcacccgaacatgggccttgcccacctataacaaccacctctacaagcaaatctccagtcaatcaggggccagcaacgacaaccactacttcggctacagcaccccctgggggtattttgatttcaacagattccactgccatttctcaccacgtgactggcagcgactcatcaacaacaattggggattccggcccaagagactcaacttcaagctcttcaacatccaagtcaaggaggtcacgacgaatgatggcaccacgaccatcgctaataaccttaccagcacggttcaagtcttcacggactcggagtaccagttgccgtacgtcctcggctctgcgcaccagggctgcctccctccgttcccggcggacgtgttcatgattccgcagtacggctacctaacgctcaacaatggcagccaggcagtgggacggtcatccttttactgcctggaatatttcccatcgcagatgctgagaacgggcaataactttaccttcagctacaccttcgaggacgtgcctttccacagcagctacgcgcacagccagagcctggaccggctgatgaatcctctcatcgaccagtacctgtattacctgagcagaactcagactacgtccggaactgcccaaaacagggagttgcagtttagccaggcgggtccatctagcatggctaatcaggccaaaaactggctacctggaccctgttaccggcagcagcgcgtttctaaaacagcaaatgacaacaacaacagcaactttgcctggactggtgctacaaaatatcaccttaatgggcgtgattctttagtcaaccctggccctgctatggcctcacacaaagacgacgaagacaagttctttcccatgagcggtgtcttgatttttggaaagcagggcgccggagcttcaaacgttgatttggacaatgtcatgatcacagacgaagaggaaatcaaaaccactaaccccgtggccaccgaacaatatgggactgtggcaaccaatctccagagcagcaacacagcccctgcgaccggaactgtgaattctcagggagccttacctggaatggtgtggcaagacagagacgtatacctgcagggtcctatttgggccaaaattcctcacacggatggacactttcacccgtctcctctcatgggcggctttggacttaagcacccgcctcctcagatcctcatcaaaaacacgcctgttcctgcgaatcctccgacaacgttttcgcctgcaaagtttgcttcattcatcacccagtattccacaggacaagtgagcgtggagattgaatgggagctgcagaaagaaaacagcaaacgctggaatcccgaaatacagtatacatctaactataataaatctgccaacgttgatttcactgtggacaccaatggagtttatagtgagcctcgccccattggcacccgttacctcacccgtaacctg

SEQ ID NO: 928 - protein, 735 aa, Artificial Sequence
  source: /note="Description of Artificial Sequence: Synthetic polypeptide"
  VARIANT (42)..(42): /replace="Ser"
  VARIANT (168)..(168): /replace="Lys"
  VARIANT (310)..(310): /replace="Arg"
  VARIANT (410)..(410): /replace="Gln"
  VARIANT (446)..(446): /replace="Arg"
  VARIANT (461)..(461): /replace="Leu"
  VARIANT (471)..(471): /replace="Ser"
  VARIANT (475)..(475): /replace="Arg"
  VARIANT (504)..(504): /replace="Ala"
  VARIANT (539)..(539): /replace="Asn
  SITE (1)..(735): /note="Variant residues given in the sequence have no preference with respect to those in the annotations for variant positions"
MAADGYLPDWLEDNLSEGIREWWDLKPGAPQPKANQQHQDDGRGLVLPGYKYLGPFNGLDKGEPVNEADAAALEHDKAYDQQLKAGDNPYLKYNHADAEFQERLQEDTSFGGNLGRAVFQAKKRVLEPLGLVEEAAKTAPGKKRPVEQSPQEPDSSSGIGKSGQQPARKRLNFGQTGDSESVPDPQPLGEPPAAPSGVGSNTMASGGGAPMADNNEGADGVGNSSGNWHCDSTWLGDRVITTSTRTWALPTYNNHLYKQISSQSGASNDNHYFGYSTPWGYFDFNRFHCHFSPRDWQRLINNNWGFRPKKLNFKLFNIQVKEVTQNDGTTTIANNLTSTVQVFTDSEYQLPYVLGSAHQGCLPPFPADVFMIPQYGYLTLNNGSQAVGRSSFYCLEYFPSQMLRTGNNFTFSYTFEDVPFHSSYAHSQSLDRLMNPLIDQYLYYLSRTQTTSGTTQQSRLQFSQAGPSSMAQQAKNWLPGPCYRQQRVSKTANDNNNSNFAWTGATKYHLNGRDSLVNPGPAMASHKDDEEKFFPMHGVLIFGKQGTGASNVDLDNVMITDEEEIRTTNPVATEQYGTVATNLQSSNTAPATGTVNSQGALPGMVWQDRDVYLQGPIWAKIPHTDGHFHPSPLMGGFGLKHPPPQILIKNTPVPANPPTTFSPAKFASFITQYSTGQVSVEIEWELQKENSKRWNPEIQYTSNYNKSVNVDFTVDTNGVYSEPRPIGTRYLTRNL

SEQ ID NO: 929 - DNA, 2205 bp, Artificial Sequence
  source: /note="Description of Artificial Sequence: Synthetic polynucleotide"
  variation (124)..(126): /replace="agt"
  variation (502)..(504): /replace="aaa"
  variation (928)..(930): /replace="aga"
  variation (1228)..(1230): /replace="cag"
  variation (1336)..(1338): /replace="aga"
  variation (1381)..(1383): /replace="ctc"
  variation (1411)..(1413): /replace="tct"
  variation (1423)..(1425): /replace="aga"
  variation (1510)..(1512): /replace="gcg"
  variation (1615)..(1617): /replace="aac"
  misc_feature (1)..(2205): /note="Variant residues given in the sequence have no preference with respect to those in the annotations for variant positions"
atggctgctgacggttatcttccagattggctcgaggacaacctttctgaaggcattcgtgagtggtgggatctgaaacctggagcccctcaacccaaagcgaaccaacaacaccaggacgacggtcggggtcttgtgcttccgggttacaaatacctcggaccctttaacggactcgacaaaggagagccggtcaacgaggcggacgcggcagccctcgaacacgacaaagcttacgaccagcagctcaaggccggtgacaacccgtacctcaagtacaaccacgccgacgccgagtttcaggagcgtcttcaagaagatacgtcttttgggggcaaccttggcagagcagtcttccaggccaaaaagagggtccttgagcctcttggtctggttgaggaagcagctaaaacggctcctggaaagaagaggcctgtagaacagtctcctcaggaaccggactcatcatctggtattggcaaatcgggccaacagcctgccagaaaaagactaaatttcggtcagactggagactcagagtcagtcccagaccctcaacctctcggagaaccaccagcagccccctcaggtgtgggatctaatacaatggcttcaggcggtggcgcaccaatggcagacaataacgagggtgccgatggagtgggtaattcctcaggaaattggcattgcgattccacatggctgggcgacagagtcatcaccaccagcaccagaacctgggccctgcccacttacaacaaccatctctacaagcaaatctccagccaatcaggagcttcaaacgacaaccactactttggctacagcaccccttgggggtattttgactttaacagattccactgccacttctcaccacgtgactggcagcgactcattaacaacaactggggattccggcccaagaaactcaacttcaagctcttcaacatccaagttaaagaggtcacgcagaacgatggcacgacgactattgccaataaccttaccagcacggttcaagtgtttacggactcggagtatcagctcccgtacgtgctcgggtcggcgcaccaaggctgtctcccgccgtttccagcggacgtcttcatgatccctcagtatggatacctcaccctgaacaacggaagtcaagcggtgggacgctcatccttttactgcctggagtacttcccttcgcagatgctaaggactggaaataacttcacattcagctataccttcgaggatgtaccttttcacagcagctacgctcacagccagagtttggatcgcttgatgaatcctcttattgatcagtatctgtactacctgagcagaacgcaaacaacctctggaacaacccaacaatcacggctgcaatttagccaggctgggccttcgtctatggctcagcaggccaaaaattggctacctgggccctgctaccggcaacagagagtttcaaagactgctaacgacaacaacaacagtaactttgcttggacaggggccaccaaatatcatctcaatggccgcgactcgctggtgaatccaggaccagctatggccagtcacaaggacgatgaagaaaaatttttccctatgcacggcgttctaatatttggcaaacaagggacaggggcaagtaacgtagatttagataatgtaatgattacggatgaagaagagattcgtaccaccaatcctgtggcaacagagcagtatggaactgtggcaactaacttgcagagctcaaatacagctcccgcgactggaactgtcaatagtcagggggccttacctggcatggtgtggcaagatcgtgacgtgtaccttcaaggacctatctgggcaaagattcctcacacggatggacactttcatccttctcctctgatgggaggctttggactgaaacatccgcctcctcaaatcttgatcaaaaatactccggtaccggcaaatcctccgacgactttcagcccggccaagtttgcttcatttatcactcagtactccactggacaggtcagcgtggaaattgagtgggagctacagaaagaaaacagcaaacgttggaatccagagattcagtacacttccaactacaacaagtctgttaatgtggactttactgtagacactaatggtgtttatagtgaacctcgccctattggaacccggtatctcacacgaaacttg

SEQ ID NO: 930 - protein, 736 aa, Artificial Sequence
  source: /note="Description of Artificial Sequence: Synthetic polypeptide"
MAADGYLPDWLEDNLSEGIREWWDLKPGAPKPKANQQKQDDGRGLVLPGYKYLGPFNGLDKGEPVNAADAAALEHDKAYDQQLKAGDNPYLRYNHADAEFQERLQEDTSFGGNLGRAVFQAKKRVLEPLGLVEEGAKTAPGKKRPVEQSPQEPDSSSGIGKKGQQPARKRLNFGQTGDSESVPDPQPLGEPPAAPSGVGSNTMAAGGGAPMADNNEGADGVGNASGNWHCDSTWLGDRVITTSTRTWALPTYNNHLYKQISSQSGGSTNDNTYFGYSTPWGYFDFNRFHCHFSPRDWQRLINNNWGFRPKRLNFKLFNIQVKEVTTNDGTTTIANNLTSTVQVFTDSEYQLPYVLGSAHQGCLPPFPADVFMIPQYGYLTLNNGSQAVGRSSFYCLEYFPSQMLRTGNNFEFSYTFEDVPFHSSYAHSQSLDRLMNPLIDQYLYYLSRTQTTSGTAGNRTLQFSQAGPSSMANQAKNWLPGPCYRQQRVSKTANQNNNSNFAWTGATKYHLNGRDSLVNPGPAMATHKDDEDKFFPMSGVLIFGKQGAGNSNVDLDNVMITNEEEIKTTNPVATEQYGTVATNLQSANTAPATGTVNSQGALPGMVWQDRDVYLQGPIWAKIPHTDGHFHPSPLMGGFGLKHPPPQILIKNTPVPANPPTTFSPAKFASFITQYSTGQVSVEIEWELQKENSKRWNPEIQYTSNYNKSTNVDFAVDTNGVYSEPRPIGTRYLTRNL

SEQ ID NO: 931 - protein, 736 aa, Artificial Sequence
  source: /note="Description of Artificial Sequence: Synthetic polypeptide"
MAADGYLPDWLEDNLSEGIREWWDLKPGAPKPKANQQKQDDGRGLVLPGYKYLGPFNGLDKGEPVNAADAAALEHDKAYDQQLKAGDNPYLRYNHADAEFQERLQEDTSFGGNLGRAVFQAKKRVLEPLGLVEEGAKTAPGKKRPVEQSPQEPDSSSGIGKKGQQPAKKRLNFGQTGDSESVPDPQPLGEPPAAPSGVGSNTMASGGGAPMADNNEGADGVGNASGNWHCDSTWLGDRVITTSTRTWALPTYNNHLYKQISSQSGASTNDNTYFGYSTPWGYFDFNRFHCHFSPRDWQRLINNNWGFRPKRLNFKLFNIQVKEVTTNDGTTTIANNLTSTVQVFTDSEYQLPYVLGSAHQGCLPPFPADVFMIPQYGYLTLNNGSQAVGRSSFYCLEYFPSQMLRTGNNFQFSYTFEDVPFHSSYAHSQSLDRLMNPLIDQYLYYLSRTQTTSGTAGNRELQFSQAGPSSMANQAKNWLPGPCYRQQRVSKTTNQNNNSNFAWTGATKYHLNGRDSLVNPGPAMATHKDDEDKFFPMSGVLIFGKQGAGNSNVDLDNVMITNEEEIKTTNPVATEEYGTVATNLQSANTAPATGTVNSQGALPGMVWQNRDVYLQGPIWAKIPHTDGHFHPSPLMGGFGLKHPPPQILIKNTPVPANPPTTFSPAKFASFITQYSTGQVSVEIEWELQKENSKRWNPEIQYTSNYNKSTNVDFAVDTNGVYSEPRPIGTRYLTRNL

SEQ ID NO: 932 - protein, 736 aa, Artificial Sequence
  source: /note="Description of Artificial Sequence: Synthetic polypeptide"
MAADGYLPDWLEDNLSEGIREWWDLKPGAPKPKANQQKQDDGRGLVLPGYKYLGPFNGLDKGEPVNAADAAALEHDKAYDQQLKAGDNPYLRYNHADAEFQERLQEDTSFGGNLGRAVFQAKKRVLEPLGLVEEGAKTAPGKKRPVEQSPQEPDSSSGIGKKGQQPARKRLNFGQTGDSESVPDPQPLGEPPAAPSGVGSNTMAAGGGAPMADNNEGADGVGNASGNWHCDSTWLGDRVITTSTRTWALPTYNNHLYKQISSQSGGSTNDNTYFGYSTPWGYFDFNRFHCHFSPRDWQRLINNNWGFRPKRLNFKLFNIQVKEVTTNDGTTTIANNLTSTVQVFTDSEYQLPYVLGSAHQGCLPPFPADVFMIPQYGYLTLNNGSQAVGRSSFYCLEYFPSQMLRTGNNFEFSYTFEDVPFHSSYAHSQSLDRLMNPLIDQYLYYLSRTQTTSGTAGNRELQFSQAGPSSMANQAKNWLPGPCYRQQRVSKTTNQNNNSNFAWTGATKYHLNGRDSLVNPGPAMATHKDDEDKFFPMSGVLIFGKQGAGNSNVDLDNVMITSEEEIKTTNPVATEEYGTVATNLQSSNTAPATGTVNSQGALPGMVWQERDVYLQGPIWAKIPHTDGHFHPSPLMGGFGLKHPPPQILIKNTPVPANPPTTFSPAKFASFITQYSTGQVSVEIEWELQKENSKRWNPEIQYTSNYNKSTNVDFAVDTNGVYSEPRPIGTRYLTRNL

SEQ ID NO: 933 - protein, 736 aa, Artificial Sequence
  source: /note="Description of Artificial Sequence: Synthetic polypeptide"
MAADGYLPDWLEDNLSEGIREWWDLKPGAPKPKANQQKQDDGRGLVLPGYKYLGPFNGLDKGEPVNAADAAALEHDKAYDQQLKAGDNPYLRYNHADAEFQERLQEDTSFGGNLGRAVFQAKKRVLEPLGLVEEGAKTAPGKKRPVEQSPQEPDSSSGIGKKGQQPARKRLNFGQTGDSESVPDPQPLGEPPAAPSGVGSNTMASGGGAPMADNNEGADGVGNASGNWHCDSTWLGDRVITTSTRTWALPTYNNHLYKQISSQSGGSTNDNTYFGYSTPWGYFDFNRFHCHFSPRDWQRLINNNWGFRPKKLNFKLFNIQVKEVTTNDGTTTIANNLTSTVQVFTDSEYQLPYVLGSAHQGCLPPFPADVFMIPQYGYLTLNNGSQAVGRSSFYCLEYFPSQMLRTGNNFEFSYTFEDVPFHSSYAHSQSLDRLMNPLIDQYLYYLSRTQTTSGTAGNRELQFSQAGPSSMANQAKNWLPGPCYRQQRVSKTTNQNNNSNFAWTGATKYHLNGRDSLVNPGPAMATHKDDEDKFFPMSGVLIFGKQGAGNSNVDLDNVMITSEEEIKTTNPVATEEYGTVATNLQSANTAPATGTVNSQGALPGMVWQDRDVYLQGPIWAKIPHTDGHFHPSPLMGGFGLKHPPPQILIKNTPVPANPPTTFSPAKFASFITQYSTGQVSVEIEWELQKENSKRWNPEIQYTSNYNKSTNVDFAVDTNGVYSEPRPIGTRYLTRNL

SEQ ID NO: 934 - protein, 736 aa, Artificial Sequence
  source: /note="Description of Artificial Sequence: Synthetic polypeptide"
MAADGYLPDWLEDNLSEGIREWWDLKPGAPKPKANQQKQDDGRGLVLPGYKYLGPFNGLDKGEPVNAADAAALEHDKAYDQQLKAGDNPYLRYNHADAEFQERLQEDTSFGGNLGRAVFQAKKRVLEPLGLVEEGAKTAPGKKRPVEQSPQEPDSSSGIGKKGQQPARKRLNFGQTGDSESVPDPQPLGEPPAAPSGVGSNTMAAGGGAPMADNNEGADGVGNASGNWHCDSTWLGDRVITTSTRTWALPTYNNHLYKQISSQSGGSTNDNTYFGYSTPWGYFDFNRFHCHFSPRDWQRLINNNWGFRPKKLNFKLFNIQVKEVTTNDGTTTIANNLTSTVQVFTDSEYQLPYVLGSAHQGCLPPFPADVFMIPQYGYLTLNNGSQAVGRSSFYCLEYFPSQMLRTGNNFQFSYTFEDVPFHSSYAHSQSLDRLMNPLIDQYLYYLSRTQTTSGTAGNRTLQFSQAGPSSMANQAKNWLPGPCYRQQRVSKTTNQNNNSNFAWTGATKYHLNGRDSLVNPGPAMATHKDDEDKFFPMSGVLIFGKQGAGNSNVDLDNVMITNEEEIKTTNPVATEEYGTVATNLQSANTAPATGTVNSQGALPGMVWQDRDVYLQGPIWAKIPHTDGHFHPSPLMGGFGLKHPPPQILIKNTPVPANPPTTFSPAKFASFITQYSTGQVSVEIEWELQKENSKRWNPEIQYTSNYNKSTNVDFAVDTNGVYSEPRPIGTRYLTRNL

SEQ ID NO: 935 - protein, 736 aa, Artificial Sequence
  source: /note="Description of Artificial Sequence: Synthetic polypeptide"
MAADGYLPDWLEDNLSEGIREWWDLKPGAPKPKANQQKQDDGRGLVLPGYKYLGPFNGLDKGEPVNAADAAALEHDKAYDQQLKAGDNPYLRYNHADAEFQERLQEDTSFGGNLGRAVFQAKKRVLEPLGLVEEGAKTAPGKKRPVEQSPQEPDSSSGIGKKGQQPAKKRLNFGQTGDSESVPDPQPLGEPPAAPSGVGSNTMAAGGGAPMADNNEGADGVGNASGNWHCDSTWLGDRVITTSTRTWALPTYNNHLYKQISSQSGGSTNDNTYFGYSTPWGYFDFNRFHCHFSPRDWQRLINNNWGFRPKKLNFKLFNIQVKEVTTNDGTTTIANNLTSTVQVFTDSEYQLPYVLGSAHQGCLPPFPADVFMIPQYGYLTLNNGSQAVGRSSFYCLEYFPSQMLRTGNNFEFSYTFEDVPFHSSYAHSQSLDRLMNPLIDQYLYYLSRTQTTSGTAGNRTLQFSQAGPSSMANQAKNWLPGPCYRQQRVSKTANQNNNSNFAWTGATKYHLNGRDSLVNPGPAMATHKDDEDKFFPMSGVLIFGKQGAGNSNVDLDNVMITSEEEIKTTNPVATEQYGTVATNLQSSNTAPATGTVNSQGALPGMVWQNRDVYLQGPIWAKIPHTDGHFHPSPLMGGFGLKHPPPQILIKNTPVPANPPTTFSPAKFASFITQYSTGQVSVEIEWELQKENSKRWNPEIQYTSNYNKSTNVDFAVDTNGVYSEPRPIGTRYLTRNL

SEQ ID NO: 936 - protein, 736 aa, Artificial Sequence
  source: /note="Description of Artificial Sequence: Synthetic polypeptide"
MAADGYLPDWLEDNLSEGIREWWDLKPGAPKPKANQQKQDDGRGLVLPGYKYLGPFNGLDKGEPVNAADAAALEHDKAYDQQLKAGDNPYLRYNHADAEFQERLQEDTSFGGNLGRAVFQAKKRVLEPLGLVEEGAKTAPGKKRPVEQSPQEPDSSSGIGKKGQQPAKKRLNFGQTGDSESVPDPQPLGEPPAAPSGVGSNTMASGGGAPMADNNEGADGVGNASGNWHCDSTWLGDRVITTSTRTWALPTYNNHLYKQISSQSGGSTNDNTYFGYSTPWGYFDFNRFHCHFSPRDWQRLINNNWGFRPKKLNFKLFNIQVKEVTTNDGTTTIANNLTSTVQVFTDSEYQLPYVLGSAHQGCLPPFPADVFMIPQYGYLTLNNGSQAVGRSSFYCLEYFPSQMLRTGNNFEFSYTFEDVPFHSSYAHSQSLDRLMNPLIDQYLYYLSRTQTTSGTAGNRTLQFSQAGPSSMANQAKNWLPGPCYRQQRVSKTANQNNNSNFAWTGATKYHLNGRDSLVNPGPAMATHKDDEDKFFPMSGVLIFGKQGAGNSNVDLDNVMITSEEEIKTTNPVATEEYGTVATNLQSSNTAPATGTVNSQGALPGMVWQNRDVYLQGPIWAKIPHTDGHFHPSPLMGGFGLKHPPPQILIKNTPVPANPPTTFSPAKFASFITQYSTGQVSVEIEWELQKENSKRWNPEIQYTSNYNKSTNVDFAVDTNGVYSEPRPIGTRYLTRNL

SEQ ID NO: 937 - protein, 736 aa, Artificial Sequence
  source: /note="Description of Artificial Sequence: Synthetic polypeptide"
MAADGYLPDWLEDNLSEGIREWWDLKPGAPKPKANQQKQDDGRGLVLPGYKYLGPFNGLDKGEPVNAADAAALEHDKAYDQQLKAGDNPYLRYNHADAEFQERLQEDTSFGGNLGRAVFQAKKRVLEPLGLVEEGAKTAPGKKRPVEQSPQEPDSSSGIGKKGQQPAKKRLNFGQTGDSESVPDPQPLGEPPAAPSGVGSNTMASGGGAPMADNNEGADGVGNASGNWHCDSTWLGDRVITTSTRTWALPTYNNHLYKQISSQSGGSTNDNTYFGYSTPWGYFDFNRFHCHFSPRDWQRLINNNWGFRPKKLNFKLFNIQVKEVTTNDGTTTIANNLTSTVQVFTDSEYQLPYVLGSAHQGCLPPFPADVFMIPQYGYLTLNNGSQAVGRSSFYCLEYFPSQMLRTGNNFQFSYTFEDVPFHSSYAHSQSLDRLMNPLIDQYLYYLSRTQTTSGTAGNRELQFSQAGPSSMANQAKNWLPGPCYRQQRVSKTTNQNNNSNFAWTGATKYHLNGRDSLVNPGPAMATHKDDEDKFFPMSGVLIFGKQGAGNSNVDLDNVMITNEEEIKTTNPVATEQYGTVATNLQSANTAPATGTVNSQGALPGMVWQDRDVYLQGPIWAKIPHTDGHFHPSPLMGGFGLKHPPPQILIKNTPVPANPPTTFSPAKFASFITQYSTGQVSVEIEWELQKENSKRWNPEIQYTSNYNKSTNVDFAVDTNGVYSEPRPIGTRYLTRNL

SEQ ID NO: 938 - DNA, 2211 bp, Artificial Sequence
  source: /note="Description of Artificial Sequence: Synthetic polynucleotide"
atggctgccgatggttatcttccagattggctcgaggacaacctctctgagggcattcgcgagtggtgggacttgaaacctggagccccgaaacccaaagccaaccagcaaaagcaggacgacggccggggtctggtgcttcctggctacaagtacctcggacccttcaacggactcgacaagggggagcccgtcaacgcggcggacgcagcggccctcgagcacgacaaggcctacgaccagcagctcaaagcgggtgacaatccgtacctgcggtataaccacgccgacgccgagtttcaggagcgtctgcaagaagatacgtcttttgggggcaacctcgggcgagcagtcttccaggccaagaagcgggttctcgaacctctcggtctggttgaggaaggcgctaagacggctcctggaaagaagagaccggtagagcaatcaccccaggaaccagactcctcttcgggcatcggcaagaaaggccagcagcccgcgaaaaagagactcaactttgggcagacaggcgactcagagtcagtgcccgaccctcaaccactcggagaaccccccgcagccccctctggtgtgggatctaatacaatggctgcaggcggtggcgctccaatggcagacaataacgaaggcgccgacggagtgggtaacgcctcaggaaattggcattgcgattccacatggctgggcgacagagtcatcaccaccagcacccgaacctgggccctccccacctacaacaaccacctctacaagcaaatctccagccaatcgggagcaagcaccaacgacaacacctacttcggctacagcaccccctgggggtattttgactttaacagattccactgccacttctcaccacgtgactggcagcgactcatcaacaacaactggggattccggcccaagagactcaacttcaagctcttcaacatccaggtcaaggaggtcacgacgaatgatggcaccacgaccatcgccaataaccttaccagcacggttcaggtctttacggactcggaataccagctcccgtacgtcctcggctctgcgcaccagggctgcctgcctccgttcccggcggacgtcttcatgattcctcagtacgggtacctgactctgaacaatggcagtcaggccgtgggccgttcctccttctactgcctggagtactttccttctcaaatgctgagaacgggcaacaactttgagttcagctacacgtttgaggacgtgccttttcacagcagctacgcgcacagccaaagcctggaccggctgatgaaccccctcatcgaccagtacctgtactacctgtctcggactcagaccacgagtggtaccgcaggaaatcggacgttgcaattttctcaggccgggcctagtagcatggcgaatcaggccaaaaactggctacccgggccctgctaccggcagcaacgcgtctccaagacagcgaatcaaaataacaacagcaactttgcctggaccggtgccaccaagtatcatctgaatggcagagactctctggtaaatcccggtcccgctatggcaacccacaaggacgacgaagacaaattttttccgatgagcggagtcttaatatttgggaaacagggagctggaaatagcaacgtggaccttgacaacgttatgataaccagtgaggaagaaattaaaaccaccaacccagtggccacagaacagtacggcacggtggccactaacctgcaatcgtcaaacaccgctcctgctacagggaccgtcaacagtcaaggagccttacctggcatggtctggcagaaccgggacgtgtacctgcagggtcctatctgggccaagattcctcacacggacggacactttcatccctcgccgctgatgggaggctttggactgaaacacccgcctcctcagatcctgattaagaatacacctgttcccgcgaatcctccaactaccttcagtccagctaagtttgcgtcgttcatcacgcagtacagcaccggacaggtcagcgtggaaattgaatgggagctgcagaaagaaaacagcaaacgctggaacccagagattcaatacacttccaactacaacaaatctacaaatgtggactttgctgttgacacaaatggcgtttattctgagcctcgccccatcggcacccgttacctcacccgtaatctgtaa

SEQ ID NO: 939 - protein, 738 aa, Artificial Sequence; identical to SEQ ID NO: 18
  source: /note="Description of Artificial Sequence: Synthetic polypeptide"

SEQ ID NO: 940 - DNA, 2211 bp, Artificial Sequence
  source: /note="Description of Artificial Sequence: Synthetic polynucleotide"
atggctgccgatggttatcttccagattggctcgaggacaacctctctgagggcattcgcgagtggtgggacttgaaacctggagccccgaaacccaaagccaaccagcaaaagcaggacgacggccggggtctggtgcttcctggctacaagtacctcggacccttcaacggactcgacaagggggagcccgtcaacgcggcggacgcagcggccctcgagcacgacaaggcctacgaccagcagctcaaagcgggtgacaatccgtacctgcggtataaccacgccgacgccgagtttcaggagcgtctgcaagaagatacgtcttttgggggcaacctcgggcgagcagtcttccaggccaagaagcgggttctcgaaccttttggtctggttgaggaaggcgctaagacggctcctggaaagaaacgtccggtagagcagtcgccacaagagccagactcctcctcgggcatcggcaagacaggccagcagcccgctaaaaagagactcaattttggtcagactggcgactcagagtcagtccccgacccacaacctctcggagaacctccagcaacccccgctgctgtgggacctactacaatggcttcaggcggtggcgcaccaatggcagacaataacgaaggcgccgacggagtgggtaatgcctcaggaaattggcattgcgattccacatggctgggcgacagagtcatcaccaccagcacccgcacctgggccttgcccacctacaataaccacctctacaagcaaatctccagtgcttcaacgggggccagcaacgacaaccactacttcggctacagcaccccctgggggtattttgatttcaacagattccactgccacttttcaccgcgtgactggcagcgactcatcaacaacaattggggattccggcccaagagactcaacttcaagctcttcaacatccaagtcaaggaggtcacgacgagtgatggcgtcacaaccatcgctaataaccttaccagcacggttcaagtcttctcggactcggagtaccagcttccgtacgtcctcggctctgcgcaccagggctgcctccctccgttcccggcggacgtgttcatgattccgcaatacggctacctgacgctcaacaatggcagccaagccgtgggacgttcatccttttactgcctggaatatttcccttctcagatgctgagaacgggcaacaactttaccttcagctacacctttgaggaagtgcctttccacagcagctacgcgcacagccagagcctggaccggctgatgaatcctctcatcgaccaatacctgtattacctgaacagaactcaaaatcagtccggaagtgcccaaaacaaggacttgctgtttagccgtgggtctccagctggcatgtctgttcagcccaaaaactggctacctggaccctgttatcggcagcagcgcgtttctaaaacaaaaacaggcaacaacaacagcaattttacctggactggtgcttcaaaatataacctcaatgggcatgaatccatcatcaaccctggcactgctatggcctcacacaaagacgacgaagacaagttctttcccatgagcggtgtcatgatttttggaaaagagagcgccggagcttcaaacactgcattggacaatgtcatgattacagacgaagaggaaattaaagccactaaccctgtggccaccgaaagatttgggaccgtggcagtcaatttccagagcagcagcacacaccctgcgaccggagatgtgcatgttatgggagcattacctggcatggtgtggcaagatagagacgtgtacctgcagggtcccatctgggccaaaattcctcacacagatggacactttcacccgtctcctcttatgggcggctttggactcaagcacccgcctcctcagatcctcatcaaaaacacgcctgttcctgcgaatcctccggcggagttttcagctacaaagtttgcttcattcatcacccaatactccacaggacaagtgagtgtggaaattgaatgggagctgcagaaagaaaacagcaagcgctggaatcccgaagtgcagtacacatccaattatgcaaaatctgccaacgttgattttaccgtggacaacaatggactttatactgagcctcgccccattggcacccgttaccttacccgtcccctgtaa

SEQ ID NO: 941 - DNA, 2211 bp, Artificial Sequence; identical to SEQ ID NO: 940
  source: /note="Description of Artificial Sequence: Synthetic polynucleotide"

SEQ ID NO: 942 - DNA, 2202 bp, Artificial Sequence
  source: /note="Description of Artificial Sequence: Synthetic polynucleotide"
atgactgacggttaccttccagattggctagaggacaacctctctgaaggcgttcgagagtggtgggcgctgcaacctggagcccctaaacccaaggcaaatcaacaacatcaggacaacgctcggggtcttgtgcttccgggttacaaatacctcggacccggcaacggacttgacaagggggaacccgtcaacgcagcggacgcggcagccctcgaacacgacaaggcctacgaccagcagctcaaggccggtgacaacccctacctcaagtacaaccacgccgacgccgagtttcaggagcgtcttcaagaagatacgtcttttgggggcaacctcggacgagcagtcttccaggccaaaaagaggatccttgagcctctgggtctggttgaggaagcggctaagacggctcctggaaaaaagagacctgtagagcaatctccagcagaaccggactcctcttcgggcatcggcaaatcaggccagcagcccgctagaaaaagactgaattttggtcagactggcgacacagagtcagtcccagaccctcaaccactcggacaacctcccgcagccccctctggtgtgggatctactacaatggcttcaggcggtggcgcaccaatggcagacaataacgagggtgccgatggagtgggtaattcctcaggaaattggcattgcgattcccaatggctgggcgacagagtcatcaccaccagcacccgcacctgggccctgcccacctacaacaatcacctctacaagcaaatctccagccaatcaggagccaccaacgacaaccactactttggctacagcaccccctgggggtattttgacttcaacagattccactgccacttttcaccacgtgactggcaaagactcatcaacaacaactggggattccgacccaagagactcaacttcaagctctttaacattcaagtcaaagaggtcacgcagaatgacggtacgacgacgattgccaataaccttaccagcacggttcaggtgtttactgactccgagtaccagctcccgtacgtcctcggctcggcgcatcagggatgcctcccgccgttcccagcagacgtcttcatggtcccacagtatggatacctcaccctgaacaacgggagtcaggcggtaggacgctcttccttttactgcctggagtactttccttctcagatgctgcgtactggaaacaactttcagtttagctacacttttgaagacgtgcctttccacagcagctacgctcacagccaaagtctggaccgtctcatgaatcctctgatcgaccagtacctgtactatctgaacaggacacaaacagccagtggaactcagcagtctcggctactgtttagccaagctggacccaccagtatgtctcttcaagctaaaaactggctgcctggaccttgctacagacagcagcgtctgtcaaagcaggcaaacgacaacaacaacagcaactttccctggactggtgccaccaaatatcatctgaatggccgggactcattggtgaacccgggccctgctatggccagtcacaaggatgacaaagaaaagtttttccccatgcatggaaccctgatatttggtaaagaaggaacaaatgccaacaacgcggatttggaaaatgtcatgattacagatgaagaagaaatccgcaccaccaatcccgtggctacggagcagtacgggactgtgtcaaataatttgcaaaactcaaacgctggtccaactactggaactgtcaatcaccaaggagcgttacctggtatggtgtggcaggatcgagacgtgtacctgcagggacccatttgggccaagattcctcacaccgatggacactttcatccttctccactgatgggaggttttgggctcaaacacccgcctcctcagatcatgatcaaaaacactcccgttccagccaatcctcccacaaactttagtgcggcaaagtttgcttccttcatcacacagtactccacggggcaggtcagcgtggagatcgagtgggagctgcagaaggagaacagcaaacgctggaatcccgaaattcagtacacttccaactacaacaaatctgttaatgtggactttactgtggacactaatggtgtgtattcagagcctcgccccattggcaccagatacctgactcgtaatctgtaa

SEQ ID NO: 943 - DNA, 2211 bp, Artificial Sequence
  source: /note="Description of Artificial Sequence: Synthetic polynucleotide"
atggctgccgatggttatcttccagattggctcgaggacaacctctctgagggcattcgcgagtggtgggacttgaaacctggagccccgaaacccaaagccaaccagcaaaagcaggacgacggccggggtctggtgcttcctggctacaagtacctcggacccttcaacggactcgacaagggggagcccgtcaacgcggcggacgcagcggccctcgagcacgacaaggcctacgaccagcagctcaaagcgggtgacaatccgtacctgcggtataaccacgccgacgccgagtttcaggagcgtctgcaagaagatacgtcttttgggggcaacctcgggcgagcagtcttccaggccaagaagcgggttctcgaaccttttggtctggttgaggaaggcgctaagacggctcctggaaagaaacgtccggtagagcagtcgccacaagagccagactcctcctcgggcatcggcaagacaggccagcagcccgctaaaaagagactcaattttggtcagactggcgactcagagtcagtccccgacccacaacctctcggagaacctccagcaacccccgctgctgtgggacctactacaatggcttcaggcggtggcgcaccaatggcagacaataacgaaggcgccgacggagtgggtaatgcctcaggaaattggcattgcgattccacatggctgggcgacagagtcatcaccaccagcacccgcacctgggccttgcccacctacaataaccacctctacaagcaaatctccagtgcttcaacgggggccagcaacgacaaccactacttcggctacagcaccccctgggggtattttgatttcaacagattccactgccacttttcaccacgtgactggcagcgactcatcaacaacaattggggattccggcccaagagactcaacttcaagctcttcaacatccaagtcaaggaggtcacgacgaatgatggcgtcacaaccatcgctaataaccttaccagcacggttcaagtcttctcggactcggagtaccagcttccgtacgtcctcggctctgcgcaccagggctgcctccctccgttcccggcggacgtgttcatgattccgcaatacggctacctgacgctcaacaatggcagccaagccgtgggacgttcatccttttactgcctggaatatttcccttctcagatgctgagaacgggcaacaactttaccttcagctacacctttgaggaagtgcctttccacagcagctacgcgcacagccagagcctggaccggctgatgaatcctctcatcgaccaatacctgtattacctgaacagaactcaaaatcagtccggaagtgcccaaaacaaggacttgctgtttagccgtgggtctccagctggcatgtctgttcagcccaaaaactggctacctggaccctgttatcggcagcagcgcgtttctaaaacaaaaacagacaacaacaacagcaattttacctggactggtgcttcaaaatataacctcaatgggcgtgaatccatcatcaaccctggcactgctatggcctcacacaaagacgacgaagacaagttctttcccatgagcggtgtcatgatttttggaaaagagagcgccggagcttcaaacactgcattggacaatgtcatgattacagacgaagaggaaattaaagccactaaccctgtggccaccgaaagatttgggaccgtggcagtcaatttccagagcagcagcacagaccctgcgaccggagatgtgcatgttatgggagcattacctggcatggtgtggcaagatagagacgtgtacctgcagggtcccatctgggccaaaattcctcacacagatggacactttcacccgtctcctcttatgggcggctttggactcaagcacccgcctcctcagatcctcatcaaaaacacgcctgttcctgcgaatcctccggcggagttttcagctacaaagtttgcttcattcatcacccaatactccacaggacaagtgagtgtggaaattgaatgggagctgcagaaagaaaacagcaagcgctggaatcccgaagtgcagtacacatccaattatgcaaaatctgccaacgttgattttaccgtggacaacaatggactttatactgagcctcgccccattggcacccgttaccttacccgtcccctgtaa

SEQ ID NO: 944 - DNA, 2211 bp, Artificial Sequence
  source: /note="Description of Artificial Sequence: Synthetic polynucleotide"
atggctgccgatggttatcttccagattggctcgaggacaacctctctgagggcattcgcaagtggtgggacttgaaacctggagccccgaaacccaaagccaaccagcaaaagcaggacgacggccggggtctggtgcttcctggctacaagtacctcggacccttcaacggactcgacaagggggagcccgtcaacgcggcggacgcagcggccctcgagcacgacaaggcctacgaccagcagctcaaagcgggtgacaatccgtacctgcggtataaccacgccgacgccgagtttcaggagcgtctgcaagaagatacgtcttttgggggcaacctcgggagagcagtcttccaggccaagaagcgggttctcgaaccttttggtctggttgaggaaggcgctaagacggctcctggaaagaaacgtccggtagagcagtcgccacaagagccagactcctcctcgggcatcggcaagacaggccagcagcccgctaaaaagagactcaattttggtcagactggcgactcagagtcagtccccgacccacaacctctcggagaacctccagcaacccccgctgctgtgggacctactacaatggcttcaggcggtggcgcaccaatggcagacaataacgaaggcgccgacggagtgggtaatgcctcaggaaattggcattgcgattccacatggctgggcgacagagtcatcaccaccagcacccgcacctgggccttgcccacctacaataaccacctctacaagcaaatctccagtgcttcaacgggggccagcaacgacaaccactacttcggctacagcaccccctgggggtattttgatttcaacagattccactgccacttttcaccacgtgactggcagcgactcatcaacaacaattggggattccggcccaagagactcaacttcaagctcttcaacatccaagtcaaggaggtcacgacgaatgatggcgtcacaaccatcgctaataaccttaccagcacggttcaagtcttctcggactcggagtaccagcttccgtacgtcctcggctctgcgcaccagggctgcctccctccgttcccggcggacgtgttcatgattccgcaatacggctacctgacgctcaacaatggcagccaagccgtgggacgttcatccttttactgcctggaatatttcccttctcagatgctgagaacgggcaacaactttaccttcagctacacctttgaggaagtgcctttccacagcagctacgcgcacagccagagcctggaccggctgatgaatcctctcatcgaccaatacctgtattacctgaacagaactcaaaatcagtccggaagtgcccaaaacaaggacttgctgtttagccgtgggtctccagctggcatgtctgttcagcccaaaaactggctacctggaccctgttatcggcagcagcgcgtttctaaaacaaaaacagacaacaacaacagcaattttacctggactggtgcttcaaaatataacctcaatgggcgtgaatccatcatcaaccctggcactgctatggcctcacacaaagacgacaaagacaagttctttcccatgagcggtgtcatgatttttggaaaagagagcgccggagcttcaaacactgcattggacaatgtcatgattacagacgaagaggaaattaaagccactaaccctgtggccaccgaaagatttgggaccgtggcagtcaatttccagagcagcagcacagaccctgcgaccggagatgtgcatgttatgggagcattacctggcatggtgtggcaagatagagacgtgtacctgcagggtcccatttgggccaaaattcctcacacagatggacactttcacccgtctcctcttatgggcggctttggactcaagcacccgcctcctcagatcctcatcaaaaacacacctgttcctgcgaatcctccggcggagttttcagctacaaagtttgcttcattcatcacccaatactccacaggacaagtgagtgtggaaattgaatgggagctgcagaaagaaaacagcaagcgctggaatcccgaagtgcagtacacatccaattatgcaaaatctgccaacgttgattttaccgtggacaacaatggactttatactgagcctcgccccattggcacccgttaccttacccgtcccctgtaa

SEQ ID NO: 945 - DNA, 2211 bp, Artificial Sequence
  source: /note="Description of Artificial Sequence: Synthetic polynucleotide"
atggctgccgatggttatcttccagattggctcgaggacaacctctctgagggcattcgcgagtggtgggacttgaaacctggagccccgaaacccaaagccaaccagcaaaagcaggacaacggccggggtctggtgcttcctggctacaagtacctcggacccttcaacggactcgacaagggggagcccgtcaacgcggcggacgcagcggccctcgagcacgacaaggcctacgaccagcagctcaaagcgggtgacaatccgtacctgcggtataaccacgccgacgccgagtttcaggagcgtctgcaagaagatacgtcttttgggggcaacctcgggcgagcagtcttccaggccaagaagcgggttctcgaaccttttggtctggttgaggaaggcgctaagacggctcctggaaagaaacgtccggtagagcagtcgccacaagagccagactcctcctcgggcatcggcaagacaggccagcagcccgctaaaaagagactcaattttggtcagactggcgactcagagtcagtccccgacccacaacctctcggagaacctccagcaacccccgctgctgtgggacctactacaatggcttcaggcggtggcgcaccaatggcagacaataacgaaggcgccgacggagtgggtaatgcctcaggaaattggcattgcgattccacatggctgggcgacagagtcatcaccaccagcacccgcacctgggccttgcccacctacaataaccacctctacaagcaaatctccagtgcttcaacgggggccagcaacgacaaccactacttcggctacagcaccccctgggggtattttgatttcaacagattccactgccacttttcaccacgtgactggcagcgactcatcaacaacaattggggattccggcccaagagactcaacttcaagctcttcaacatccaagtcaaggaggtcacgacgaatgatggcgtcacaaccatcgctaataaccttaccagcacggttcaagtcttctcggactcggagtaccagcttccgtacgtcctcggctctgcgcaccagggctgcctccctccgttcccggcggacgtgttcatgattccgcaatacggctacctgacgctcaacaatggcagccaagccgtgggacgttcatccttttactgcctggaatatttcccttctcagatgctgagaacgggcaacaactttaccttcagctacacctttgaggaagtgcctttccacagcagctacgcgcacagccagagcctggaccggctgatgaatcctctcatcgaccaatacctgtattacctgaacagaactcaaaatcagtccggaagtgcccaaaacaaggacttgctgtttagccgtgggtctccagctggcatgtctgttcagcccaaaaactggctacctggaccctgttatcggcagcagcgcgtttctaaaacaaaaacagacaacaacaacagcaattttacctggactggtgcttcaaaatataacctcaatgggcgtgaatccatcatcaaccctggcactgctatggcctcacacaaagacgacgaagacaagttctttcccatgagcggtgtcatgatttttggaaaagagagcgccggagcttcaaacactgcattggacaatgtcatgattacagacgaagaggaaattaaagccactaaccctgtggccaccgaaagatttgggaccgtggcagtcaatttccagagcagcagcacacaccctgcgaccggagatgtgcatgttatgggagcattacctggcatggtgtggcaagatagagacgtgtacctgcagggtcccatctgggccaaaattcctcacacagatggacactttcacccgtctcctcttatgggcggctttggactcaagcacccgcctcctcagatcctcatcaaaaacacgcctgttcctgcgaatcctccggcggagttttcagctacaaagtttgcttcattcatcacccaatactccacaggacaagtgagtgtggaaattgaatgggagctgcagaaagaaaacagcaagcgctggaatcccgaagtgcagtacacatccaattatgcaaaatctgccaacgttgattttaccgtggacaacaatggactttatactgagcctcgccccattggcacccgttaccttacccgtcccctgtaa

SEQ ID NO: 946 - DNA, 2211 bp, Artificial Sequence
  source: /note="Description of Artificial Sequence: Synthetic polynucleotide"
atggctgccgatggttatcttccagattggctcgaggacaacctctctgagggcattcgcgagtggtgggacttgaaacctggagccccgaaacccaaagccaaccagcaaaagcaggacgacggccggggtctggtgcttcctggctacaagtacctcggacccttcaacggactcgacaagggggagcccgtcaacgcggcggacgcagcggccctcgagcacgacaaggcctacgaccagcagctcaaagcgggtgacaatccgtacctgcggtataaccacgccgacgccgagtttcaggagcgtctgcaagaagatacgtcttttgggggcaacctcgggcgagcagtcttccaggccaaaaagcgggttctcgaaccttttggtctggttgaggaaggcgctaagacggctcctggaaagaaacgtccggtagagcagtcgccacaagagccagactcctcctcgggcatcggcaagacaggccagcagcccgctaaaaagagactcaattttggtcagactggcgactcagagtcagtccccgacccacaacctctcggagaacctccagcaacccccgctgctgtgggacctactacaatggcttcaggcggtggcgcaccaatggcagacaataacgaaggcgccgacggagtgggtaatgcctcaggaaattggcattgcgattccacatggctgggcgacagagtcatcaccaccagcacccgcacctgggccttgcccacctacaataaccacctctacaagcaaatctccagtgcttcaacgggggccagcaacgacaaccactacttcggctacagcaccccctgggggtattttgatttcaacagattccactgccacttttcaccacgtgactggcagcgactcatcaacaacaattggggattccggcccaagagactcaacttcaagctcttcaacatccaagtcaaggaggtcacgacgaatgatggcgtcacaaccatcgctaataaccttaccagcacggttcaagtcttctcggactcggagtaccagcttccgtacgtcctcggctctgcgcaccagggctgcctccctccgttcccggcggacgtgttcatgattccgcaatacggctacctgacgctcaacaatggcagccaagccgtgggacgttcatccttttattgcctggaatatttcccatcgcagatgctgagaacgggcaataactttaccttcagctacacctttgaggacgtgcctttccacagcagctacgcgcacagccagagcctggaccggctgatgaatcctctcatcgaccagtacctgtattacctgaacagaactcagaaccagtccggaagtgcccaaaacaaggacttgctgtttagccgggggtctccagctggcatgtctgttcagctcaaaaactggctacctggaccctgttatcggcagcagcgcgtttctaaaacaaaaacagacaacaacaacagcaattttacctggactggtgcttcaaaatataaccttaatgggcgtgaatccatcatcaaccctggcactgctatggcctcacacaaagacgacgaagacaagttctttcccatgagcggtgtcatgatttttggaaaagagagcgccggagcttcaaacactgcattggacaatgtcatgattacagacgaagaggaaattaaagccactaaccctgtggccaccgaaagatttgggaccgtggcagtcaatttccagagcagcagcacagaccctgcgaccggagatgtgcatgttatgggagcattacctggcatggtgtggcaagatagagacgtgtacctgcagggtcccatttgggccaaaattcctcacacagatggacactttcacccgtctcctcttatgggcggctttggactcaaacacccgcctcctcagatcctcatcaaaaacacacctgttcctgcgaatcctccggcggagttttcagctacaaagtttgcttcattcatcacccaatactccacaggacaagtgagcgtggaaattgaatgggagctgcagaaagaaaacagcaagcgctggaatcccgaagtgcagtacacatccaattatgcaaaatctgccaacgttgattttaccgtggacaacaatggactttatactgagcctcgccccattggcacccgttaccttacccgtcccctgtaa

SEQ ID NO: 947 - DNA, 2211 bp, Artificial Sequence
  source: /note="Description of Artificial Sequence: Synthetic polynucleotide"
atggctgccgatggttatcttccagattggctcgaggacaacctctctgagggcattcgcgagtggtgggacttgaaacctggagccccgaaacccaaagccaaccagcaaaagcaggacgacggccggggtctggtgcttcctggctacaagtacctcggacccttcaacggactcgacaagggggagcccgtcaacgcggcggacgcagcggccctcgagcacgacaaggcctacgaccagcagctcaaagcgggtgacaatccgtacctgcggtataaccacgccgacgccgagtttcaggagcgtctgcaagaagatacgtcttttgggggcaacctcgggcgagcagtcttccaggccaagaagcgggttctcgaaccttttggtctggttgaggaaggtgctaagacggctcctggaaagaagagaccggtagagcagtcgccccaagaaccagactcctcatcgggcatcggcaaatcaggccagcagcccgctaaaaagagactcaattttggtcagactggcgactcagagtcagtccccgacccacaacctctcggagaacctccagcaacccccgctgctgtgggacctactacaatggcttcaggcggtggcgcaccaatggcagacaataacgaaggcgccgacggagtgggtaatgcctcaggaaattggcattgcgattccacatggctgggcgacagagtcattaccaccagcacccgaacctgggccctgcccacctataacaaccacctctacaaacaaatctccagcgcttcaacgggggccagcaacgacaaccactacttcggctacagcaccccctgggggtattttgattttaacagattccactgccacttctcaccacgtgactggcagcgactcatcaacaacaattggggattccggcccaagagactcaacttcaagctcttcaacatccaagtcaaggaggtcacgacgaacgatggcgtcacgaccatcgctaataaccttaccagcacggttcaagtcttctcggactcggagtaccagttgccgtacgtcctcggctctgcgcaccagggctgcctccctccgttcccggcggacgtgttcatgattccgcagtacggctacctaacactcaacaatggcagccaggccgtgggacgttcatccttttactgcctggaatatttcccatcgcagatgctgagaacgggcaataactttaccttcagctacacattcgaggacgtgcctttccacagcagctacgcgcacagccaaagcctggaccggctgatgaatcctctcatcgaccagtacttgtattacctaaacagaactcaaaatcagtccggaagtgcccaaaacaaggacttgctgtttagccgggggtctccagctggcatgtctgttcagcccaaaaactggctacctggaccctgttatcggcagcagcgcgtttctaaaacaaaaacagacaacaacaacagcaactttacctggactggtgcttcaaaatataaccttaatgggcgtgaatctataatcaaccctggcactgctatggcttcacacaaagacgacgaagacaagttctttccaatgagcggtgtcatgatttttggcaaggagagcgccggagcttcaaacactgcattggacaatgtcatgattacagacgaagaggaaattaaagccactaaccctgtggccaccgaaagatttgggaccgtggcagtcaatttccagagcagcagcacagaccctgcgaccggagatgtgcatgttatgggagcattacctggcatggtgtggcaagatagagacgtgtacctgcagggtccaatttgggccaaaattcctcacacagatggacactttcacccgtctcctcttatgggcggctttggacttaagcacccgcctcctcagatcctcatcaaaaacacgcctgttcctgcgaatcctccggcagagttttcggctacaaagtttgcttcattcatcacccagtattccacaggacaagtgagtgtggaaattgaatgggagttgcagaaagaaaacagcaagcgttggaatcccgaagtgcagtacacatctaattatgcaaaatctgccaacgttgatttcactgtggacaacaatggactttatactgagcctcgccccattggcacccgttacctcacccgtcccctgtaa

SEQ ID NO: 948 - DNA, 2211 bp, Artificial Sequence
  source: /note="Description of Artificial Sequence: Synthetic polynucleotide"
atggctgccgatggttatcttccagattggctcgaggacaacctctctgagggcattcgcgagtggtgggacttgaaacctggagccccgaaacccaaagccaaccagcaaaagcaggacgacggccggggtctggtgcttcctggctacaagtacctcggacccttcaacggactcgacaagggggagcccgtcaacgcggcggacgcagcggccctcgagcacgacaaggcctacgaccagcagctcaaagcgggtgacaatccgtacctgcggtataaccacgccgacgccgagtttcaggagcgtctgcaagaagatacgtcttttgggggcaacctcgggcgagcagtcttccaggccaagaagagggttctcgaaccttttggtctggttgaggaaggtgctaagacggctcctggaaagaaacgtccggtagagcagtcaccccaagaaccagactcctcctcgggcattggcaaatcaggccagcagcccgctaaaaagagactcaattttggtcagactggcgactcagagtcagtccccgacccacaacctctcggagaacctccagcaacccccgctgctttgggacctactacaatggcttcaggcggtggcgcaccaatggcagacaataacgaaggcgccgacggagtgggtaatgcctcaggaaattggcattgcgattccacatggctgggcgacagagtcatcaccaccagcacccgcacctgggccttgcccacctacaataaccacctctacaagcaaatctccagtgcttcaacgggggccagcaacgacaaccactacttcggctacagcaccccctgggggtattttgatttcaacagattccactgccatttctcaccacgtgactggcagcgactcatcaacaacaactggggattccggcccaagagactcaacttcaagctcttcaacatccaagtcaaggaggtcacgacgaacgatggcgtcacgaccatcgctaataaccttaccagcacggttcaagtcttctcggactcggagtaccagcttccgtacgtcctcggctctgcgcaccagggctgcctccctccgttcccggcggacgtgttcatgattccgcagtacggctacctgacgctcaacaatggcagcaaagccgtgggacgttcatccttttactgcctggaatatttcccttctcagatgctgagaacgggcaacaactttaccttcagctacacctttgaggaagtgcctttccacagcagctacgcgcacagccagagcctggaccggctgatgaatcctctcatcgaccaatacctgtattacctgaacagaactcaaaatcagtccggaagtgcccaaaacaaggacttgctgtttagccgtgggtctccagctggcatgtctgttcagcccaaaaactggctacctggaccctgttatcggcagcagcgcgtttctaaaacaaaaacagacaacaacaacagcaattttacctggactggtgcttcaaaatataacctcaatgggcgtgaatccatcatcaaccctggcactgctatggcctcacacaaagacgacgaagacaagttctttcccatgagcggtgtcatgatttttggaaaagagagcgccggagcttcaaacactgcattggacaatgtcatgattacagacgaagaggaaattaaagccactaaccctgtggccaccgaaagatttgggaccgtggcagtcaatttccagagcagcagcacagaccctgcgaccggagatgtgcatgttatgggagcattacctggcatggtgtggcaagatagagacgtgtacctgcagggtcccatttgggccaaaattcctcacacggatggacactttcacccgtctcctcttatgggcggctttggactcaagcacccgcctcctcagatcctcatcaaaaacacacctgttcctgcgaatcctccggcagagttttcggctacaaagtttgcttcattcatcacccagtactccacaggacaagtgagcgtggaaattgaatgggagttgcagaaagaaaacagtaagcgctggaatcccgaagtgcagtacacatctaattatgcaaaatctgccaacgttgacttcactgtggacaacaatggactttatactgagcctcgccccattggcacccgttacctcacccgtcccctgtaa

SEQ ID NO: 949 - DNA, 2970 bp, Artificial Sequence
  source: /note="Description of Artificial Sequence: Synthetic polynucleotide"
agatgaccgccaaggtcgtagagtccgccaaggccattctgggcggcagcaaggtgcgcgtggaccaaaaatgcaaggcctctgcgcagatcgaccccacccccgtgatcgtcacctccaacaccaacatgtgcgccgtgattgacgggaacagcaccaccttcgagcaccagcagcccctgcaggaccggatgttcaagtttgaactcacccgccgcctcgactacgactttggcaaggtcaccaagcaggaagtcaaggactttttccggtgggcggctgatcacgtgactgacgtggctcatgagttttacgtcacaaagggtggagctaagaaaaggcccgccccctctgacgaggatataagcgagcccaagcggccgcgcgtgtcatttgcgcagccggagacgtcagacgcggaagctcccggagacttcgccgacaggtaccaaaacaaatgttctcgtcacgcgggtatgctgcagatgctctttccctgcaagacgtgcgagagaatgaatcagaattccaacgtctgcttcacgcacggtcagaaagattgcggggagtgctttcccgggtcagaatctcaaccggtttctgtcgtcagaaaaacgtatcagaaactgtgcatccttcatcagctccggggggcacccgagatcgcctgctctgcttgcgaccaactcaaccccgatttggacgattgccaatttgagcaataaatgactgaaatcaggtatggctgctgacggttatcttccagattggctcgaggacaacctctctgaaggcattcgcgagtggtgggcgctgaaacctggagctccacaacccaaggccaaccaacagcatcaggacaacggcaggggtcttgtgcttcctgggtacaagtacctcggacccttcaacggactcgacaagggagagccggtcaacgaggcagacgccgcggccctcgagcacgacaaggcctacgacaagcagctcgagcagggggacaacccgtatctcaagtacaaccacggcgacgccgagttccagcagcgcttggcgaccgacacctcttttgggggcaacctcgggcgagcagtcttccaggccaaaaagaggattctcgagcctctgggtctggttgaagagggcgttaaaacggctcctggaaagaaacgcccattagaaaagactccaaatcggccgaccaacccggactctgggaaggccccggccaagaaaaagcaaaaagacggcgaaccagccgactctgctagaaggacactcgactttgaagactctggagcaggagacggaccccctgagggatcatcttccggagaaatgtctcatgatgctgagatgcgtgcggcgccaggcggaaatgctgtcgaggcgggacaaggtgccgatggagtgggtaatgcctccggtgattggcattgcgattccacctggtcagagggccgagtcaccaccaccagcacccgaacctgggtcctacccacgtacaacaaccacctgtacctgcgaatcggaacaacggccaacagcaacacctacaacggattctccaccccctggggatactttgactttaaccgcttccactgccacttttccccacgcgactggcagcgactcatcaacaacaactggggactcaggccgaaatcgatgcgtgttaaaatcttcaacatacaggtcaaggaggtcacgacgtcaaacggcgagactacggtcgctaataaccttaccagcacggttcagatctttgcggattcgacgtatgaactcccatacgtgatggacgccggtcaggaggggagctttcctccgtttcccaacgacgtctttatggttccccaatacggatactgcggagttgtcactggaaaaaaccagaaccagacagacagaaatgccttttactgcctggaatactttccatcccaaatgctaagaactggcaacaattttgaagtcagttaccaatttgaaaaagttcctttccattcaatgtacgcgcacagccagagcctggacagaatgatgaatcctttactggatcagtacctgtggcatctgcaatcgaccactaccggaaattcccttaatcaaggaacagctaccaccacgtacgggaaaattaccactggagactttgcctactacaggaaaaactggttgcctggagcctgcattaaacaacaaaaattttcaaagaatgccaatcaaaactacaagattcccgccagcgggggagacgcccttttaaagtatgacacgcataccactctaaatgggcgatggagtaacatggctcctggacctccaatggcaaccgcaggtgccggggactcggattttagcaacagccagctgatctttgccggacccaatccgagcggtaacacgaccacatcttcaaacaatttgttgtttacctcagaagaggagattgccacaacaaacccacgagacacggacatgtttggacagattgcagataataatcaaaatgccaccaccgcccctcacatcgctaacctggacgctatgggaattgttcccggaatggtctggcaaaacagagacatctactaccagggccctatttgggccaaggtccctcacacggacggacactttcacccttcgccgctgatgggaggatttggactgaaacacccgcctccacagattttcatcaaaaacacccccgtacccgccaatcccaatactacctttagcgctgcaaggattaattcttttctgacgcagtacagcaccggacaagttgccgttcagatcgactgggaaattcagaaggagcattccaaacgctggaatcccgaagttcaatttacttcaaactacggcactcaaaattctatgctgtgggctcccgacaatgctggcaactaccacgaactccgggctattgggtcccgtttcctcacccaccacttgtaa

SEQ ID NO: 950 - protein, 736 aa, Artificial Sequence
  source: /note="Description of Artificial Sequence: Synthetic polypeptide"
MAADGYLPDWLEDNLSEGIREWWDLKPGAPKPKANQQKQDDGRGLVLPGYKYLGPFNGLDKGEPVNAADAAALEHDKAYDQQLKAGDNPYLRYNHADAEFQERLQEDTSFGGNLGRAVFQAKKRVLEPFGLVEEGAKTAPGKKRPVEQSPQEPDSSSGIGKTGQQPAKKRLNFGQTGDSESVPDPQPLGEPPATPAAVGPTTMASGGGAPMADNNEGADGVGNASGNWHCDSTWLGDRVITTSTRTWALPTYNNHLYKQISSASTGASNDNHYFGYSTPWGYFDFNRFHCHFSPRDWQRLINNNWGFRPKRLNFKLFNIQVKEVTTSDGVTTIANNLTSTVQVFSDSEYQLPYVLGSAHQGCLPPFPADVFMIPQYGYLTLNNGSQAVGRSSFYCLEYFPSQMLRTGNNFTFSYTFEEVPFHSSYAHSQSLDRLMNPLIDQYLYYLNRTQNQSGSAQNKDLLFSRGSPAGMSVQPKNWLPGPCYRQQRVSKTKTGNNNSNFTWTGASKYNLNGHESIINPGTAMASHKDDEDKFFPMSGVMIFGKESAGASNTALDNVMITDEEEIKATNPVATERFGTVAVNFQSSSTHPATGDVHVMGALPGMVWQDRDVYLQGPIWAKIPHTDGHFHPSPLMGGFGLKHPPPQILIKNTPVPANPPAEFSATKFASFITQYSTGQVSVEIEWELQKENSKRWNPEVQYTSNYAKSANVDFTVDNNGLYTEPRPIGTRYLTRPL

SEQ ID NO: 951 - protein, 736 aa, Artificial Sequence; identical to SEQ ID NO: 950
  source: /note="Description of Artificial Sequence: Synthetic polypeptide"

SEQ ID NO: 952 - protein, 733 aa, Artificial Sequence
  source: /note="Description of Artificial Sequence: Synthetic polypeptide"
MTDGYLPDWLEDNLSEGVREWWALQPGAPKPKANQQHQDNARGLVLPGYKYLGPGNGLDKGEPVNAADAAALEHDKAYDQQLKAGDNPYLKYNHADAEFQERLQEDTSFGGNLGRAVFQAKKRILEPLGLVEEAAKTAPGKKRPVEQSPAEPDSSSGIGKSGQQPARKRLNFGQTGDTESVPDPQPLGQPPAAPSGVGSTTMASGGGAPMADNNEGADGVGNSSGNWHCDSQWLGDRVITTSTRTWALPTYNNHLYKQISSQSGATNDNHYFGYSTPWGYFDFNRFHCHFSPRDWQRLINNNWGFRPKRLNFKLFNIQVKEVTQNDGTTTIANNLTSTVQVFTDSEYQLPYVLGSAHQGCLPPFPADVFMVPQYGYLTLNNGSQAVGRSSFYCLEYFPSQMLRTGNNFQFSYTFEDVPFHSSYAHSQSLDRLMNPLIDQYLYYLNRTQTASGTQQSRLLFSQAGPTSMSLQAKNWLPGPCYRQQRLSKQANDNNNSNFPWTGATKYHLNGRDSLVNPGPAMASHKDDKEKFFPMHGTLIFGKEGTNANNADLENVMITDEEEIRTTNPVATEQYGTVSNNLQNSNAGPTTGTVNHQGALPGMVWQDRDVYLQGPIWAKIPHTDGHFHPSPLMGGFGLKHPPPQIMIKNTPVPANPPTNFSAAKFASFITQYSTGQVSVEIEWELQKENSKRWNPEIQYTSNYNKSVNVDFTVDTNGVYSEPRPIGTRYLTRNL

SEQ ID NO: 953 - protein, 736 aa, Artificial Sequence; identical to SEQ ID NO: 768
  source: /note="Description of Artificial Sequence: Synthetic polypeptide"

SEQ ID NO: 954 - protein, 736 aa, Artificial Sequence
  source: /note="Description of Artificial Sequence: Synthetic polypeptide"
MAADGYLPDWLEDNLSEGIRKWWDLKPGAPKPKANQQKQDDGRGLVLPGYKYLGPFNGLDKGEPVNAADAAALEHDKAYDQQLKAGDNPYLRYNHADAEFQERLQEDTSFGGNLGRAVFQAKKRVLEPFGLVEEGAKTAPGKKRPVEQSPQEPDSSSGIGKTGQQPAKKRLNFGQTGDSESVPDPQPLGEPPATPAAVGPTTMASGGGAPMADNNEGADGVGNASGNWHCDSTWLGDRVITTSTRTWALPTYNNHLYKQISSASTGASNDNHYFGYSTPWGYFDFNRFHCHFSPRDWQRLINNNWGFRPKRLNFKLFNIQVKEVTTNDGVTTIANNLTSTVQVFSDSEYQLPYVLGSAHQGCLPPFPADVFMIPQYGYLTLNNGSQAVGRSSFYCLEYFPSQMLRTGNNFTFSYTFEEVPFHSSYAHSQSLDRLMNPLIDQYLYYLNRTQNQSGSAQNKDLLFSRGSPAGMSVQPKNWLPGPCYRQQRVSKTKTDNNNSNFTWTGASKYNLNGRESIINPGTAMASHKDDKDKFFPMSGVMIFGKESAGASNTALDNVMITDEEEIKATNPVATERFGTVAVNFQSSSTDPATGDVHVMGALPGMVWQDRDVYLQGPIWAKIPHTDGHFHPSPLMGGFGLKHPPPQILIKNTPVPANPPAEFSATKFASFITQYSTGQVSVEIEWELQKENSKRWNPEVQYTSNYAKSANVDFTVDNNGLYTEPRPIGTRYLTRPL

SEQ ID NO: 955 - protein, 736 aa, Artificial Sequence
  source: /note="Description of Artificial Sequence: Synthetic polypeptide"
MAADGYLPDWLEDNLSEGIREWWDLKPGAPKPKANQQKQDNGRGLVLPGYKYLGPFNGLDKGEPVNAADAAALEHDKAYDQQLKAGDNPYLRYNHADAEFQERLQEDTSFGGNLGRAVFQAKKRVLEPFGLVEEGAKTAPGKKRPVEQSPQEPDSSSGIGKTGQQPAKKRLNFGQTGDSESVPDPQPLGEPPATPAAVGPTTMASGGGAPMADNNEGADGVGNASGNWHCDSTWLGDRVITTSTRTWALPTYNNHLYKQISSASTGASNDNHYFGYSTPWGYFDFNRFHCHFSPRDWQRLINNNWGFRPKRLNFKLFNIQVKEVTTNDGVTTIANNLTSTVQVFSDSEYQLPYVLGSAHQGCLPPFPADVFMIPQYGYLTLNNGSQAVGRSSFYCLEYFPSQMLRTGNNFTFSYTFEEVPFHSSYAHSQSLDRLMNPLIDQYLYYLNRTQNQSGSAQNKDLLFSRGSPAGMSVQPKNWLPGPCYRQQRVSKTKTDNNNSNFTWTGASKYNLNGRESIINPGTAMASHKDDEDKFFPMSGVMIFGKESAGASNTALDNVMITDEEEIKATNPVATERFGTVAVNFQSSSTHPATGDVHVMGALPGMVWQDRDVYLQGPIWAKIPHTDGHFHPSPLMGGFGLKHPPPQILIKNTPVPANPPAEFSATKFASFITQYSTGQVSVEIEWELQKENSKRWNPEVQYTSNYAKSANVDFTVDNNGLYTEPRPIGTRYLTRPL

SEQ ID NO: 956 - protein, 736 aa, Artificial Sequence
  source: /note="Description of Artificial Sequence: Synthetic polypeptide"
MAADGYLPDWLEDNLSEGIREWWDLKPGAPKPKANQQKQDDGRGLVLPGYKYLGPFNGLDKGEPVNAADAAALEHDKAYDQQLKAGDNPYLRYNHADAEFQERLQEDTSFGGNLGRAVFQAKKRVLEPFGLVEEGAKTAPGKKRPVEQSPQEPDSSSGIGKTGQQPAKKRLNFGQTGDSESVPDPQPLGEPPATPAAVGPTTMASGGGAPMADNNEGADGVGNASGNWHCDSTWLGDRVITTSTRTWALPTYNNHLYKQISSASTGASNDNHYFGYSTPWGYFDFNRFHCHFSPRDWQRLINNNWGFRPKRLNFKLFNIQVKEVTTNDGVTTIANNLTSTVQVFSDSEYQLPYVLGSAHQGCLPPFPADVFMIPQYGYLTLNNGSQAVGRSSFYCLEYFPSQMLRTGNNFTFSYTFEDVPFHSSYAHSQSLDRLMNPLIDQYLYYLNRTQNQSGSAQNKDLLFSRGSPAGMSVQLKNWLPGPCYRQQRVSKTKTDNNNSNFTWTGASKYNLNGRESIINPGTAMASHKDDEDKFFPMSGVMIFGKESAGASNTALDNVMITDEEEIKATNPVATERFGTVAVNFQSSSTDPATGDVHVMGALPGMVWQDRDVYLQGPIWAKIPHTDGHFHPSPLMGGFGLKHPPPQILIKNTPVPANPPAEFSATKFASFITQYSTGQVSVEIEWELQKENSKRWNPEVQYTSNYAKSANVDFTVDNNGLYTEPRPIGTRYLTRPL

SEQ ID NO: 957 - protein, 736 aa, Artificial Sequence
  source: /note="Description of Artificial Sequence: Synthetic polypeptide"
MAADGYLPDWLEDNLSEGIREWWDLKPGAPKPKANQQKQDDGRGLVLPGYKYLGPFNGLDKGEPVNAADAAALEHDKAYDQQLKAGDNPYLRYNHADAEFQERLQEDTSFGGNLGRAVFQAKKRVLEPFGLVEEGAKTAPGKKRPVEQSPQEPDSSSGIGKSGQQPAKKRLNFGQTGDSESVPDPQPLGEPPATPAAVGPTTMASGGGAPMADNNEGADGVGNASGNWHCDSTWLGDRVITTSTRTWALPTYNNHLYKQISSASTGASNDNHYFGYSTPWGYFDFNRFHCHFSPRDWQRLINNNWGFRPKRLNFKLFNIQVKEVTTNDGVTTIANNLTSTVQVFSDSEYQLPYVLGSAHQGCLPPFPADVFMIPQYGYLTLNNGSQAVGRSSFYCLEYFPSQMLRTGNNFTFSYTFEDVPFHSSYAHSQSLDRLMNPLIDQYLYYLNRTQNQSGSAQNKDLLFSRGSPAGMSVQPKNWLPGPCYRQQRVSKTKTDNNNSNFTWTGASKYNLNGRESIINPGTAMASHKDDEDKFFPMSGVMIFGKGSAGASNTALDNVMITDEEEIKATNPVATERFGTVAVNFQSSSTDPATGDVHVMGALPGMVWQDRDVYLQGPIWAKIPHTDGHFHPSPLMGGFGLKHPPPQILIKNTPVPANPPAEFSATKFASFITQYSTGQVSVEIEWELQKENSKRWNPEVQYTSNYAKSANVDFTVDNNGLYTEPRPIGTRYLTRPL

SEQ ID NO: 958 - protein, 736 aa, Artificial Sequence; identical to SEQ ID NO: 699
  source: /note="Description of Artificial Sequence: Synthetic polypeptide"

SEQ ID NO: 959 - protein, 742 aa, Artificial Sequence
  source: /note="Description of Artificial Sequence: Synthetic polypeptide"
MAADGYLPDWLEDNLSEGIREWWALKPGAPQPKANQQHQDNGRGLVLPGYKYLGPFNGLDKGEPVNEADAAALEHDKAYDKQLEQGDNPYLKYNHADAEFQQRLATDTSFGGNLGRAVFQAKKRILEPLGLVEEGVKTAPGKKRPLEKTPNRPTNPDSGKAPAKKKQKDGEPADSARRTLDFEDSGAGDGPPEGSSSGEMSHDAEMRAAPGGNAVEAGQGADGVGNASGDWHCDSTWSEGRVTTTSTRTWVLPTYNNHLYLRIGTTANSNTYNGFSTPWGYFDFNRFHCHFSPRDWQRLINNNWGLRPKSMRVKIFNIQVKEVTTSNGETTVANNLTSTVQIFADSTYELPYVMDAGQEGSFPPFPNDVFMVPQYGYCGVVTGKNQNQTDRNAFYCLEYFPSQMLRTGNNFEVSYQFEKVPFHSMYAHSQSLDRMMNPLLDQYLWHLQSTTTGNSLNQGTATTTYGKITTGDFAYYRKNWLPGACIKQQKFSKNANQNYKIPASGGDALLKYDTHTTLNGRWSNMAPGPPMATAGAGDSDFSNSQLIFAGPNPSGNTTTSSNNLLFTSEEEIATTNPRDTDMFGQIADNNQNATTAPHIANLDAMGIVPGMVWQNRDIYYQGPIWAKVPHTDGHFHPSPLMGGFGLKHPPPQIFIKNTPVPANPNTTFSAARINSFLTQYSTGQVAVQIDWEIQKEHSKRWNPEVQFTSNYGTQNSMLWAPDNAGNYHELRAIGSRFLTHHL

SEQ ID NO: 960 - DNA, 2211 bp, Artificial Sequence
  source: /note="Description of Artificial Sequence: Synthetic polynucleotide"
atggctgccgatggttatcttccagattggctcgaggacaacctctctgagggcattcgcgagtggtgggacttgaaacctggagccccgaagcccaaagccaaccagcaaaagcaggacgacggccggggtctggtgcttcctggctacaagtacctcggacccttcaacggactcgacaagggggagcccgtcaacgcggcggacgcagcggccctcgagcacgacaaggcctacgaccagcagctcaaagcgggtgacaatccgtacctgcggtataaccacgccgacgccgagtttcaggagcgtctgcaagaagatacgtcttttgggggcaacctcgggcgagcagtcttccaggccaagaagcgggttctcgaacctctcggtctggttgaggaaggcgctaaggcggctcctggaaagaaacgtccggtagagcagtcgccacaagagccagactcctcctcgggcatcggcaagacaggccagcagcccgctaaaaagagactcaattttggtcagactggcgactcagagtcagtccccgatccacaacctctcggagaacctccagcagccccctcaggtctgggacctaatacaatggcttcaggcggtggcgctccaatggcagacaataacgaaggcgccgacggagtgggtaattcctcgggaaattggcattgcgattccacatggctgggggacagagtcatcaccaccagcacccgaacctgggccctgcccacctacaacaaccacctctacaagcaaatctccaacggcacctcgggaggaagcaccaacgacaacacctattttggctacagcaccccctgggggtattttgacttcaacagattccactgtcacttttcaccacgtgactggcaacgactcatcaacaacaattggggattccggcccaaaagactcaacttcaagctgttcaacatccaggtcaaggaagtcacgacgaacgaaggcaccaagaccatcgccaataatctcaccagcaccgtgcaggtctttacggactcggagtaccagttaccgtacgtgctaggatccgctcaccagggatgtctgcctccgttcccggcggacgtcttcatggttcctcagtacggctatttaactttaaacaatggaagccaagccctgggacgttcctccttctactgtctggagtatttcccatcgcagatgctgagaaccggcaacaactttcagttcagctacaccttcgaggacgtgcctttccacagcagctacgcgcacagccagagcctggacaggctgatgaatcccctcatcgaccagtacctgtactacctggtcagaacgcaaacgactggaactggagggacgcagactctggcattcagccaagcgggtcctagctcaatggccaaccaggctagaaattgggtgcccggaccttgctaccggcagcagcgcgtctccacgacaaccaaccagaacaacaacagcaactttgcctggacgggagctgccaagtttaagctgaacggccgagactctctaatgaatccgggcgtggcaatggcttcccacaaggatgacgacgaccgcttcttcccttcgagcggggtcctgatttttggcaagcaaggagccgggaacgatggagtggattacagccaagtgctgattacagatgaggaagaaatcaaggctaccaaccccgtggccacagaagaatatggagcagtggccatcaacaaccaggccgccaatacgcaggcgcagaccggactcgtgcacaaccagggggtgattcccggcatggtgtggcagaatagagacgtgtacctgcagggtcccatctgggccaaaattcctcacacggacggcaactttcacccgtctcccctgatgggcggctttggactgaagcacccgcctcctcaaattctcatcaagaacacaccggttccagcggacccgccgcttaccttcaaccaggccaagctgaactctttcatcacgcagtacagcaccggacaggtcagcgtggaaatcgagtgggagctgcagaaagaaaacagcaaacgctggaatccagagattcaatacacttccaactactacaaatctacaaatgtggactttgctgtcaacacggagggggtttatagcgagcctcgccccattggcacccgttacctcacccgcaacctgtaa

SEQ ID NO: 961 - DNA, 2592 bp, Artificial Sequence
  source: /note="Description of Artificial Sequence: Synthetic polynucleotide"
ctggctgccgatggttatcttccagattggctcgaggacaacctctctgagggcattcgcgagtggtgggacttgaaacctggagccccgaagcccaaagccaaccagcaaaagcaggacgacggccggggtctggtgcttcctggctacaagtacctcggacccttcaacggactcgacaagggggagcccgtcaacgcggcggacgcagcggccctcgagcacgacaaggcctacgaccagcagctcaaagcgggtgacaatccgtacctgcggtataaccacgccgacgccgagtttcaggagcgtctgcaagaagatacgtcttttgggggcaacctcgggcgagcagtcttccaggccaagaagcgggttctcgaacctctcggtctggttgaggaaggcgctaagatggaagtgcagctccaagccagtggtggcggactggtgcaggcaggaggcagcttgaggctcagctgtgccgccagcggcttcaagatcacccactacaccatgggctggttccggcaggcccctggcaaggagagggagttcgtgagcaggattacctggggtggtgacaacaccttctacagcaacagcgtgaagggcaggttcaccatcagcagggacaacgccaagaacaccgtgtacctgcagatgaacagcctgaagcccgaggacaccgccgactactactgtgcagccggcagtaccagcaccgctacccccctgagggtggactactggggcaaaggcactcaggtgacagtgtcttcaggagggggtggcagcgctcctggaaagaaacgtccggtagagcagtcgccacaagagccagactcctcctcgggcatcggcaagacaggccagcagcccgctaaaaagagactcaattttggtcagactggcgactcagagtcagtccccgatccacaacctctcggagaacctccagcagccccctcaggtctgggacctaatacaatggcttcaggcggtggcgctccaatggcagacaataacgaaggcgccgacggagtgggtaattcctcgggaaattggcattgcgattccacatggctgggggacagagtcatcaccaccagcacccgaacctgggccctgcccacctacaacaaccacctctacaagcaaatctccaacggcacctcgggaggaagcaccaacgacaacacctattttggctacagcaccccctgggggtattttgacttcaacagattccactgtcacttttcaccacgtgactggcaacgactcatcaacaacaattggggattccggcccaaaagactcaacttcaagctgttcaacatccaggtcaaggaagtcacgacgaacgaaggcaccaagaccatcgccaataatctcaccagcaccgtgcaggtctttacggactcggagtaccagttaccgtacgtgctaggatccgctcaccagggatgtctgcctccgttcccggcggacgtcttcatggttcctcagtacggctatttaactttaaacaatggaagccaagccctgggacgttcctccttctactgtctggagtatttcccatcgcagatgctgagaaccggcaacaactttcagttcagctacaccttcgaggacgtgcctttccacagcagctacgcgcacagccagagcctggacaggctgatgaatcccctcatcgaccagtacctgtactacctggtcagaacgcaaacgactggaactggagggacgcagactctggcattcagccaagcgggtcctagctcaatggccaaccaggctagaaattgggtgcccggaccttgctaccggcagcagcgcgtctccacgacaaccaaccagaacaacaacagcaactttgcctggacgggagctgccaagtttaagctgaacggccgagactctctaatgaatccgggcgtggcaatggcttcccacaaggatgacgacgaccgcttcttcccttcgagcggggtcctgatttttggcaagcaaggagccgggaacgatggagtggattacagccaagtgctgattacagatgaggaagaaatcaaggctaccaaccccgtggccacagaagaatatggagcagtggccatcaacaaccaggccgccaatacgcaggcgcagaccggactcgtgcacaaccagggggtgattcccggcatggtgtggcagaatagagacgtgtacctgcagggtcccatctgggccaaaattcctcacacggacggcaactttcacccgtctcccctgatgggcggctttggactgaagcacccgcctcctcaaattctcatcaagaacacaccggttccagcggacccgccgcttaccttcaaccaggccaagctgaactctttcatcacgcagtacagcaccggacaggtcagcgtggaaatcgagtgggagctgcagaaagaaaacagcaaacgctggaatccagagattcaatacacttccaactactacaaatctacaaatgtggactttgctgtcaacacggagggggtttatagcgagcctcgccccattggcacccgttacctcacccgcaacctgtaa

SEQ ID NO: 962 - DNA, 2601 bp, Artificial Sequence
  source: /note="Description of Artificial Sequence: Synthetic polynucleotide"
ctggctgccgatggttatcttccagattggctcgaggacaacctctctgagggcattcgcgagtggtgggacttgaaacctggagccccgaagcccaaagccaaccagcaaaagcaggacgacggccggggtctggtgcttcctggctacaagtacctcggacccttcaacggactcgacaagggggagcccgtcaacgcggcggacgcagcggccctcgagcacgacaaggcctacgaccagcagctcaaagcgggtgacaatccgtacctgcggtataaccacgccgacgccgagtttcaggagcgtctgcaagaagatacgtcttttgggggcaacctcgggcgagcagtcttccaggccaagaagcgggttctcgaacctctcggtctggttgaggaaggcgctaagatggaggtgcagctgcaggcttctggaggaggactggtgcaggctggagggagtctgaggctgtcttgcagtgcctcagtgaggactttctccatctacgccatgggctggtttaggcaggctcccgggaaggagcgcgaattcgtggccggaatcaaccggtctggcgacgtgaccaagtacgctgatttcgtgaaaggccggtttagcatttccagagacaacgccaagaatatggtgtatctgcagatgaactccctgaaacctgaagacacagctctgtactattgtgccgctacttgggcctacgataccgtgggggctctgacatcaggatataatttttggggccaggggacccaggtgacagtgagctccggaggaggaggaagcgctcctggaaagaaacgtccggtagagcagtcgccacaagagccagactcctcctcgggcatcggcaagacaggccagcagcccgctaaaaagagactcaattttggtcagactggcgactcagagtcagtccccgatccacaacctctcggagaacctccagcagccccctcaggtctgggacctaatacaatggcttcaggcggtggcgctccaatggcagacaataacgaaggcgccgacggagtgggtaattcctcgggaaattggcattgcgattccacatggctgggggacagagtcatcaccaccagcacccgaacctgggccctgcccacctacaacaaccacctctacaagcaaatctccaacggcacctcgggaggaagcaccaacgacaacacctattttggctacagcaccccctgggggtattttgacttcaacagattccactgtcacttttcaccacgtgactggcaacgactcatcaacaacaattggggattccggcccaaaagactcaacttcaagctgttcaacatccaggtcaaggaagtcacgacgaacgaaggcaccaagaccatcgccaataatctcaccagcaccgtgcaggtctttacggactcggagtaccagttaccgtacgtgctaggatccgctcaccagggatgtctgcctccgttcccggcggacgtcttcatggttcctcagtacggctatttaactttaaacaatggaagccaagccctgggacgttcctccttctactgtctggagtatttcccatcgcagatgctgagaaccggcaacaactttcagttcagctacaccttcgaggacgtgcctttccacagcagctacgcgcacagccagagcctggacaggctgatgaatcccctcatcgaccagtacctgtactacctggtcagaacgcaaacgactggaactggagggacgcagactctggcattcagccaagcgggtcctagctcaatggccaaccaggctagaaattgggtgcccggaccttgctaccggcagcagcgcgtctccacgacaaccaaccagaacaacaacagcaactttgcctggacgggagctgccaagtttaagctgaacggccgagactctctaatgaatccgggcgtggcaatggcttcccacaaggatgacgacgaccgcttcttcccttcgagcggggtcctgatttttggcaagcaaggagccgggaacgatggagtggattacagccaagtgctgattacagatgaggaagaaatcaaggctaccaaccccgtggccacagaagaatatggagcagtggccatcaacaaccaggccgccaatacgcaggcgcagaccggactcgtgcacaaccagggggtgattcccggcatggtgtggcagaatagagacgtgtacctgcagggtcccatctgggccaaaattcctcacacggacggcaactttcacccgtctcccctgatgggcggctttggactgaagcacccgcctcctcaaattctcatcaagaacacaccggttccagcggacccgccgcttaccttcaaccaggccaagctgaactctttcatcacgcagtacagcaccggacaggtcagcgtggaaatcgagtgggagctgcagaaagaaaacagcaaacgctggaatccagagattcaatacacttccaactactacaaatctacaaatgtggactttgctgtcaacacggagggggtttatagcgagcctcgccccattggcacccgttacctcacccgcaacctgtaa

SEQ ID NO: 963 - DNA, 2367 bp, Artificial Sequence
  source: /note="Description of Artificial Sequence: Synthetic polynucleotide"
ctggctgccgatggttatcttccagattggctcgaggacaacctctctgagggcattcgcgagtggtgggacttgaaacctggagccccgaagcccaaagccaaccagcaaaagcaggacgacggccggggtctggtgcttcctggctacaagtacctcggacccttcaacggactcgacaagggggagcccgtcaacgcggcggacgcagcggccctcgagcacgacaaggcctacgaccagcagctcaaagcgggtgacaatccgtacctgcggtataaccacgccgacgccgagtttcaggagcgtctgcaagaagatacgtcttttgggggcaacctcgggcgagcagtcttccaggccaagaagcgggttctcgaacctctcggtctggttgaggaaggcgctaagatgccaagcagtgtaatcgatgcgctgcagtacaagctggagggcaccacgaggctgaccaggaagaggggtctgaagctggccacggccctcagccttagcaataagttcgtagagggcagccccagcggcggcggcggcagcggcggcggcggcagcgctcctggaaagaaacgtccggtagagcagtcgccacaagagccagactcctcctcgggcatcggcaagacaggccagcagcccgctaaaaagagactcaattttggtcagactggcgactcagagtcagtccccgatccacaacctctcggagaacctccagcagccccctcaggtctgggacctaatacaatggcttcaggcggtggcgctccaatggcagacaataacgaaggcgccgacggagtgggtaattcctcgggaaattggcattgcgattccacatggctgggggacagagtcatcaccaccagcacccgaacctgggccctgcccacctacaacaaccacctctacaagcaaatctccaacggcacctcgggaggaagcaccaacgacaacacctattttggctacagcaccccctgggggtattttgacttcaacagattccactgtcacttttcaccacgtgactggcaacgactcatcaacaacaattggggattccggcccaaaagactcaacttcaagctgttcaacatccaggtcaaggaagtcacgacgaacgaaggcaccaagaccatcgccaataatctcaccagcaccgtgcaggtctttacggactcggagtaccagttaccgtacgtgctaggatccgctcaccagggatgtctgcctccgttcccggcggacgtcttcatggttcctcagtacggctatttaactttaaacaatggaagccaagccctgggacgttcctccttctactgtctggagtatttcccatcgcagatgctgagaaccggcaacaactttcagttcagctacaccttcgaggacgtgcctttccacagcagctacgcgcacagccagagcctggacaggctgatgaatcccctcatcgaccagtacctgtactacctggtcagaacgcaaacgactggaactggagggacgcagactctggcattcagccaagcgggtcctagctcaatggccaaccaggctagaaattgggtgcccggaccttgctaccggcagcagcgcgtctccacgacaaccaaccagaacaacaacagcaactttgcctggacgggagctgccaagtttaagctgaacggccgagactctctaatgaatccgggcgtggcaatggcttcccacaaggatgacgacgaccgcttcttcccttcgagcggggtcctgatttttggcaagcaaggagccgggaacgatggagtggattacagccaagtgctgattacagatgaggaagaaatcaaggctaccaaccccgtggccacagaagaatatggagcagtggccatcaacaaccaggccgccaatacgcaggcgcagaccggactcgtgcacaaccagggggtgattcccggcatggtgtggcagaatagagacgtgtacctgcagggtcccatctgggccaaaattcctcacacggacggcaactttcacccgtctcccctgatgggcggctttggactgaagcacccgcctcctcaaattctcatcaagaacacaccggttccagcggacccgccgcttaccttcaaccaggccaagctgaactctttcatcacgcagtacagcaccggacaggtcagcgtggaaatcgagtgggagctgcagaaagaaaacagcaaacgctggaatccagagattcaatacacttccaactactacaaatctacaaatgtggactttgctgtcaacacggagggggtttatagcgagcctcgccccattggcacccgttacctcacccgcaacctgtaa

SEQ ID NO: 964 - DNA, 2328 bp, Artificial Sequence
  source: /note="Description of Artificial Sequence: Synthetic polynucleotide"
ctggctgccgatggttatcttccagattggctcgaggacaacctctctgagggcattcgcgagtggtgggacttgaaacctggagccccgaagcccaaagccaaccagcaaaagcaggacgacggccggggtctggtgcttcctggctacaagtacctcggacccttcaacggactcgacaagggggagcccgtcaacgcggcggacgcagcggccctcgagcacgacaaggcctacgaccagcagctcaaagcgggtgacaatccgtacctgcggtataaccacgccgacgccgagtttcaggagcgtctgcaagaagatacgtcttttgggggcaacctcgggcgagcagtcttccaggccaagaagcgggttctcgaacctctcggtctggttgaggaaggcgctaagatgtataccatctggatgcccgagaaccccaggcccggtaccccctgcgacatcttcaccaacagcaggggcaagcgagccagcaacggcggcggcggcggcagcggcggcggcggcagcgctcctggaaagaaacgtccggtagagcagtcgccacaagagccagactcctcctcgggcatcggcaagacaggccagcagcccgctaaaaagagactcaattttggtcagactggcgactcagagtcagtccccgatccacaacctctcggagaacctccagcagccccctcaggtctgggacctaatacaatggcttcaggcggtggcgctccaatggcagacaataacgaaggcgccgacggagtgggtaattcctcgggaaattggcattgcgattccacatggctgggggacagagtcatcaccaccagcacccgaacctgggccctgcccacctacaacaaccacctctacaagcaaatctccaacggcacctcgggaggaagcaccaacgacaacacctattttggctacagcaccccctgggggtattttgacttcaacagattccactgtcacttttcaccacgtgactggcaacgactcatcaacaacaattggggattccggcccaaaagactcaacttcaagctgttcaacatccaggtcaaggaagtcacgacgaacgaaggcaccaagaccatcgccaataatctcaccagcaccgtgcaggtctttacggactcggagtaccagttaccgtacgtgctaggatccgctcaccagggatgtctgcctccgttcccggcggacgtcttcatggttcctcagtacggctatttaactttaaacaatggaagccaagccctgggacgttcctccttctactgtctggagtatttcccatcgcagatgctgagaaccggcaacaactttcagttcagctacaccttcgaggacgtgcctttccacagcagctacgcgcacagccagagcctggacaggctgatgaatcccctcatcgaccagtacctgtactacctggtcagaacgcaaacgactggaactggagggacgcagactctggcattcagccaagcgggtcctagctcaatggccaaccaggctagaaattgggtgcccggaccttgctaccggcagcagcgcgtctccacgacaaccaaccagaacaacaacagcaactttgcctggacgggagctgccaagtttaagctgaacggccgagactctctaatgaatccgggcgtggcaatggcttcccacaaggatgacgacgaccgcttcttcccttcgagcggggtcctgatttttggcaagcaaggagccgggaacgatggagtggattacagccaagtgctgattacagatgaggaagaaatcaaggctaccaaccccgtggccacagaagaatatggagcagtggccatcaacaaccaggccgccaatacgcaggcgcagaccggactcgtgcacaaccagggggtgattcccggcatggtgtggcagaatagagacgtgtacctgcagggtcccatctgggccaaaattcctcacacggacggcaactttcacccgtctcccctgatgggcggctttggactgaagcacccgcctcctcaaattctcatcaagaacacaccggttccagcggacccgccgcttaccttcaaccaggccaagctgaactctttcatcacgcagtacagcaccggacaggtcagcgtggaaatcgagtgggagctgcagaaagaaaacagcaaacgctggaatccagagattcaatacacttccaactactacaaatctacaaatgtggactttgctgtcaacacggagggggtttatagcgagcctcgccccattggcacccgttacctcacccgcaacctgtaa

SEQ ID NO: 965 - DNA, 2298 bp, Artificial Sequence
  source: /note="Description of Artificial Sequence: Synthetic polynucleotide"
ctggctgccgatggttatcttccagattggctcgaggacaacctctctgagggcattcgcgagtggtgggacttgaaacctggagccccgaagcccaaagccaaccagcaaaagcaggacgacggccggggtctggtgcttcctggctacaagtacctcggacccttcaacggactcgacaagggggagcccgtcaacgcggcggacgcagcggccctcgagcacgacaaggcctacgaccagcagctcaaagcgggtgacaatccgtacctgcggtataaccacgccgacgccgagtttcaggagcgtctgcaagaagatacgtcttttgggggcaacctcgggcgagcagtcttccaggccaagaagcgggttctcgaacctctcggtctggttgaggaaggcgctaagatgaccttcttctacggcggcagcaggggcaagaggaacaacttcaagaccgaggagtacggcggcggcggcagcggcggcggcggcagcgctcctggaaagaaacgtccggtagagcagtcgccacaagagccagactcctcctcgggcatcggcaagacaggccagcagcccgctaaaaagagactcaattttggtcagactggcgactcagagtcagtccccgatccacaacctctcggagaacctccagcagccccctcaggtctgggacctaatacaatggcttcaggcggtggcgctccaatggcagacaataacgaaggcgccgacggagtgggtaattcctcgggaaattggcattgcgattccacatggctgggggacagagtcatcaccaccagcacccgaacctgggccctgcccacctacaacaaccacctctacaagcaaatctccaacggcacctcgggaggaagcaccaacgacaacacctattttggctacagcaccccctgggggtattttgacttcaacagattccactgtcacttttcaccacgtgactggcaacgactcatcaacaacaattggggattccggcccaaaagactcaacttcaagctgttcaacatccaggtcaaggaagtcacgacgaacgaaggcaccaagaccatcgccaataatctcaccagcaccgtgcaggtctttacggactcggagtaccagttaccgtacgtgctaggatccgctcaccagggatgtctgcctccgttcccggcggacgtcttcatggttcctcagtacggctatttaactttaaacaatggaagccaagccctgggacgttcctccttctactgtctggagtatttcccatcgcagatgctgagaaccggcaacaactttcagttcagctacaccttcgaggacgtgcctttccacagcagctacgcgcacagccagagcctggacaggctgatgaatcccctcatcgaccagtacctgtactacctggtcagaacgcaaacgactggaactggagggacgcagactctggcattcagccaagcgggtcctagctcaatggccaaccaggctagaaattgggtgcccggaccttgctaccggcagcagcgcgtctccacgacaaccaaccagaacaacaacagcaactttgcctggacgggagctgccaagtttaagctgaacggccgagactctctaatgaatccgggcgtggcaatggcttcccacaaggatgacgacgaccgcttcttcccttcgagcggggtcctgatttttggcaagcaaggagccgggaacgatggagtggattacagccaagtgctgattacagatgaggaagaaatcaaggctaccaaccccgtggccacagaagaatatggagcagtggccatcaacaaccaggccgccaatacgcaggcgcagaccggactcgtgcacaaccagggggtgattcccggcatggtgtggcagaatagagacgtgtacctgcagggtcccatctgggccaaaattcctcacacggacggcaactttcacccgtctcccctgatgggcggctttggactgaagcacccgcctcctcaaattctcatcaagaacacaccggttccagcggacccgccgcttaccttcaaccaggccaagctgaactctttcatcacgcagtacagcaccggacaggtcagcgtggaaatcgagtgggagctgcagaaagaaaacagcaaacgctggaatccagagattcaatacacttccaactactacaaatctacaaatgtggactttgctgtcaacacggagggggtttatagcgagcctcgccccattggcacccgttacctcacccgcaacctgtaa

SEQ ID NO: 966 - DNA, 2211 bp, Artificial Sequence
  source: /note="Description of Artificial Sequence: Synthetic polynucleotide"
atggctgccgatggttatcttccagattggctcgaggacaaccttagtgaaggaattcgcgagtggtgggctttgaaacctggagcccctcaacccaaggcaaatcaacaacatcaagacaacgctcgaggtcttgtgcttccgggttacaaataccttggacccggcaacggactcgacaagggggagccggtcaacgcagcagacgcggcggccctcgagcacgacaaggcctacgaccagcagctcaaggccggagacaacccgtacctcaagtacaaccacgccgacgccgagttccaggagcggctcaaagaagatacgtcttttgggggcaacctcgggcgagcagtcttccaggccaaaaagaggcttcttgaacctcttggtctggttgaggaagcggctaaggcggctcctggaaagaagaggcctgtagagcagtctcctcaggaaccggactcctccgcgggtattggcaaatcgggtgcacagcccgctaaaaagagactcaatttcggtcagactggcgacacagagtcagtcccagaccctcaaccaatcggagaacctcccgcagccccctcaggtgtgggatctcttacaatggcttcaggtggtggcgcaccagtggcagacaataacgaaggtgccgatggagtgggtagttcctcgggaaattggcattgcgattcccaatggctgggggacagagtcatcaccaccagcacccgaacctgggccctgcccacctacaacaatcacctctacaagcaaatctccaacagcacatctggaggatcttcaaatgacaacgcctacttcggctacagcaccccctgggggtattttgacttcaacagattccactgccacttctcaccacgtgactggcagcgactcatcaacaacaactggggattccggcctaagcgactcaacttcaagctcttcaacattcaggtcaaagaggttacggacaacaatggagtcaagaccatcgccaataaccttaccagcacggtccaggtcttcacggactcagactatcagctcccgtacgtgctcgggtcggctcacgagggctgcctcccgccgttcccagcggacgttttcatgattcctcagtacgggtatctgacgcttaatgatggaagccaggccgtgggtcgttcgtccttttactgcctggaatatttcccgtcgcaaatgctaagaacgggtaacaacttccagttcaactacgagtttgagaacgtacctttccatagcagctacgctcacagccaaagcctggaccgactaatgaatccactcatcgaccaatacttgtactatctctcaaagactattaacgattctggacagaatcaacaaacgctaaaattcagtgtggccggacccagcaacatggctgtccagggaagaaactacatacctggacccagctaccgacaacaacgtgtctcaaccactgtgactcaaaacaacaacagcgaatttgcttggcctggagcttcttcttgggctctcaatggacgtaatagcttgatgaatcctggacctgctatggccagccacaaagaaggagaggaccgtttctttcctttgtctggatctttaatttttggcaaacaaggaactggaagagacaacgtggatgcggacgaagtcatgataaccaacgaagaagaaattaaaactactaacccggtagcaacggagtcctatggacaagtggccataaaccaccagagtgcccaagcacaggcgcagaccggctgggttcaaaaccaaggaatacttccgggtatggtttggcaggacagagatgtgtacctgcaaggacccatttgggccaaaattcctcacacggacggcaactttcacccttctccgctgatgggagggtttggaatgaagcacccgcctcctcagatcctcatcaaaaacacacctgtacctgcggatcctccaacggccttcaacaaggacaagctgaactctttcatcacccagtattctactggccaagtcagcgtggagatcgagtgggagctgcagaaggaaaacagcaagcgctggaacccggagatccagtacacttccaactattacaagtctaataatgttgaatttgctgttaatactgaaggtgtatatagtgaaccccgccccattggcaccagatacctgactcgtaatctgtaa

SEQ ID NO: 967 - DNA, 2277 bp, Artificial Sequence
  source: /note="Description of Artificial Sequence: Synthetic polynucleotide"
ctggctgccgatggttatcttccagattggctcgaggacaaccttagtgaaggaattcgcgagtggtgggctttgaaacctggagcccctcaacccaaggcaaatcaacaacatcaagacaacgctcgaggtcttgtgcttccgggttacaaataccttggacccggcaacggactcgacaagggggagccggtcaacgcagcagacgcggcggccctcgagcacgacaaggcctacgaccagcagctcaaggccggagacaacccgtacctcaagtacaaccacgccgacgccgagttccaggagcggctcaaagaagatacgtcttttgggggcaacctcgggcgagcagtcttccaggccaaaaagaggcttcttgaacctcttggtctggttgaggaagcggctaagatgaacaaccagaagatcgtgaacctgaaggagaaggtggcccagctggaggccggcggcggcggcagcgctcctggaaagaagaggcctgtagagcagtctcctcaggaaccggactcctccgcgggtattggcaaatcgggtgcacagcccgctaaaaagagactcaatttcggtcagactggcgacacagagtcagtcccagaccctcaaccaatcggagaacctcccgcagccccctcaggtgtgggatctcttacaatggcttcaggtggtggcgcaccagtggcagacaataacgaaggtgccgatggagtgggtagttcctcgggaaattggcattgcgattcccaatggctgggggacagagtcatcaccaccagcacccgaacctgggccctgcccacctacaacaatcacctctacaagcaaatctccaacagcacatctggaggatcttcaaatgacaacgcctacttcggctacagcaccccctgggggtattttgacttcaacagattccactgccacttctcaccacgtgactggcagcgactcatcaacaacaactggggattccggcctaagcgactcaacttcaagctcttcaacattcaggtcaaagaggttacggacaacaatggagtcaagaccatcgccaataaccttaccagcacggtccaggtcttcacggactcagactatcagctcccgtacgtgctcgggtcggctcacgagggctgcctcccgccgttcccagcggacgttttcatgattcctcagtacgggtatctgacgcttaatgatggaagccaggccgtgggtcgttcgtccttttactgcctggaatatttcccgtcgcaaatgctaagaacgggtaacaacttccagttcaactacgagtttgagaacgtacctttccatagcagctacgctcacagccaaagcctggaccgactaatgaatccactcatcgaccaatacttgtactatctctcaaagactattaacgattctggacagaatcaacaaacgctaaaattcagtgtggccggacccagcaacatggctgtccagggaagaaactacatacctggacccagctaccgacaacaacgtgtctcaaccactgtgactcaaaacaacaacagcgaatttgcttggcctggagcttcttcttgggctctcaatggacgtaatagcttgatgaatcctggacctgctatggccagccacaaagaaggagaggaccgtttctttcctttgtctggatctttaatttttggcaaacaaggaactggaagagacaacgtggatgcggacgaagtcatgataaccaacgaagaagaaattaaaactactaacccggtagcaacggagtcctatggacaagtggccataaaccaccagagtgcccaagcacaggcgcagaccggctgggttcaaaaccaaggaatacttccgggtatggtttggcaggacagagatgtgtacctgcaaggacccatttgggccaaaattcctcacacggacggcaactttcacccttctccgctgatgggagggtttggaatgaagcacccgcctcctcagatcctcatcaaaaacacacctgtacctgcggatcctccaacggccttcaacaaggacaagctgaactctttcatcacccagtattctactggccaagtcagcgtggagatcgagtgggagctgcagaaggaaaacagcaagcgctggaacccggagatccagtacacttccaactattacaagtctaataatgttgaatttgctgttaatactgaaggtgtatatagtgaaccccgccccattggcaccagatacctgactcgtaatctgtaa

SEQ ID NO: 968 - DNA, 2313 bp, Artificial Sequence
  source: /note="Description of Artificial Sequence: Synthetic polynucleotide"
ctggctgccgatggttatcttccagattggctcgaggacaaccttagtgaaggaattcgcgagtggtgggctttgaaacctggagcccctcaacccaaggcaaatcaacaacatcaagacaacgctcgaggtcttgtgcttccgggttacaaataccttggacccggcaacggactcgacaagggggagccggtcaacgcagcagacgcggcggccctcgagcacgacaaggcctacgaccagcagctcaaggccggagacaacccgtacctcaagtacaaccacgccgacgccgagttccaggagcggctcaaagaagatacgtcttttgggggcaacctcgggcgagcagtcttccaggccaaaaagaggcttcttgaacctcttggtctggttgaggaagcggctaagatgtataccatctggatgcccgagaaccccaggcccggtaccccctgcgacatcttcaccaacagcaggggcaagcgagccagcaacggcggcggcggcggcagcgctcctggaaagaagaggcctgtagagcagtctcctcaggaaccggactcctccgcgggtattggcaaatcgggtgcacagcccgctaaaaagagactcaatttcggtcagactggcgacacagagtcagtcccagaccctcaaccaatcggagaacctcccgcagccccctcaggtgtgggatctcttacaatggcttcaggtggtggcgcaccagtggcagacaataacgaaggtgccgatggagtgggtagttcctcgggaaattggcattgcgattcccaatggctgggggacagagtcatcaccaccagcacccgaacctgggccctgcccacctacaacaatcacctctacaagcaaatctccaacagcacatctggaggatcttcaaatgacaacgcctacttcggctacagcaccccctgggggtattttgacttcaacagattccactgccacttctcaccacgtgactggcagcgactcatcaacaacaactggggattccggcctaagcgactcaacttcaagctcttcaacattcaggtcaaagaggttacggacaacaatggagtcaagaccatcgccaataaccttaccagcacggtccaggtcttcacggactcagactatcagctcccgtacgtgctcgggtcggctcacgagggctgcctcccgccgttcccagcggacgttttcatgattcctcagtacgggtatctgacgcttaatgatggaagccaggccgtgggtcgttcgtccttttactgcctggaatatttcccgtcgcaaatgctaagaacgggtaacaacttccagttcaactacgagtttgagaacgtacctttccatagcagctacgctcacagccaaagcctggaccgactaatgaatccactcatcgaccaatacttgtactatctctcaaagactattaacgattctggacagaatcaacaaacgctaaaattcagtgtggccggacccagcaacatggctgtccagggaagaaactacatacctggacccagctaccgacaacaacgtgtctcaaccactgtgactcaaaacaacaacagcgaatttgcttggcctggagcttcttcttgggctctcaatggacgtaatagcttgatgaatcctggacctgctatggccagccacaaagaaggagaggaccgtttctttcctttgtctggatctttaatttttggcaaacaaggaactggaagagacaacgtggatgcggacgaagtcatgataaccaacgaagaagaaattaaaactactaacccggtagcaacggagtcctatggacaagtggccataaaccaccagagtgcccaagcacaggcgcagaccggctgggttcaaaaccaaggaatacttccgggtatggtttggcaggacagagatgtgtacctgcaaggacccatttgggccaaaattcctcacacggacggcaactttcacccttctccgctgatgggagggtttggaatgaagcacccgcctcctcagatcctcatcaaaaacacacctgtacctgcggatcctccaacggccttcaacaaggacaagctgaactctttcatcacccagtattctactggccaagtcagcgtggagatcgagtgggagctgcagaaggaaaacagcaagcgctggaacccggagatccagtacacttccaactattacaagtctaataatgttgaatttgctgttaatactgaaggtgtatatagtgaaccccgccccattggcaccagatacctgactcgtaatctgtaa

SEQ ID NO: 969 - DNA, 2283 bp, Artificial Sequence
  source: /note="Description of Artificial Sequence: Synthetic polynucleotide"
ctggctgccgatggttatcttccagattggctcgaggacaaccttagtgaaggaattcgcgagtggtgggctttgaaacctggagcccctcaacccaaggcaaatcaacaacatcaagacaacgctcgaggtcttgtgcttccgggttacaaataccttggacccggcaacggactcgacaagggggagccggtcaacgcagcagacgcggcggccctcgagcacgacaaggcctacgaccagcagctcaaggccggagacaacccgtacctcaagtacaaccacgccgacgccgagttccaggagcggctcaaagaagatacgtcttttgggggcaacctcgggcgagcagtcttccaggccaaaaagaggcttcttgaacctcttggtctggttgaggaagcggctaagatgaccttcttctacggcggcagcaggggcaagaggaacaacttcaagaccgaggagtacggcggcggcggcagcgctcctggaaagaagaggcctgtagagcagtctcctcaggaaccggactcctccgcgggtattggcaaatcgggtgcacagcccgctaaaaagagactcaatttcggtcagactggcgacacagagtcagtcccagaccctcaaccaatcggagaacctcccgcagccccctcaggtgtgggatctcttacaatggcttcaggtggtggcgcaccagtggcagacaataacgaaggtgccgatggagtgggtagttcctcgggaaattggcattgcgattcccaatggctgggggacagagtcatcaccaccagcacccgaacctgggccctgcccacctacaacaatcacctctacaagcaaatctccaacagcacatctggaggatcttcaaatgacaacgcctacttcggctacagcaccccctgggggtattttgacttcaacagattccactgccacttctcaccacgtgactggcagcgactcatcaacaacaactggggattccggcctaagcgactcaacttcaagctcttcaacattcaggtcaaagaggttacggacaacaatggagtcaagaccatcgccaataaccttaccagcacggtccaggtcttcacggactcagactatcagctcccgtacgtgctcgggtcggctcacgagggctgcctcccgccgttcccagcggacgttttcatgattcctcagtacgggtatctgacgcttaatgatggaagccaggccgtgggtcgttcgtccttttactgcctggaatatttcccgtcgcaaatgctaagaacgggtaacaacttccagttcaactacgagtttgagaacgtacctttccatagcagctacgctcacagccaaagcctggaccgactaatgaatccactcatcgaccaatacttgtactatctctcaaagactattaacgattctggacagaatcaacaaacgctaaaattcagtgtggccggacccagcaacatggctgtccagggaagaaactacatacctggacccagctaccgacaacaacgtgtctcaaccactgtgactcaaaacaacaacagcgaatttgcttggcctggagcttcttcttgggctctcaatggacgtaatagcttgatgaatcctggacctgctatggccagccacaaagaaggagaggaccgtttctttcctttgtctggatctttaatttttggcaaacaaggaactggaagagacaacgtggatgcggacgaagtcatgataaccaacgaagaagaaattaaaactactaacccggtagcaacggagtcctatggacaagtggccataaaccaccagagtgcccaagcacaggcgcagaccggctgggttcaaaaccaaggaatacttccgggtatggtttggcaggacagagatgtgtacctgcaaggacccatttgggccaaaattcctcacacggacggcaactttcacccttctccgctgatgggagggtttggaatgaagcacccgcctcctcagatcctcatcaaaaacacacctgtacctgcggatcctccaacggccttcaacaaggacaagctgaactctttcatcacccagtattctactggccaagtcagcgtggagatcgagtgggagctgcagaaggaaaacagcaagcgctggaacccggagatccagtacacttccaactattacaagtctaataatgttgaatttgctgttaatactgaaggtgtatatagtgaaccccgccccattggcaccagatacctgactcgtaatctgtaa

SEQ ID NO: 970 - DNA, 2283 bp, Artificial Sequence
  source: /note="Description of Artificial Sequence: Synthetic polynucleotide"
ctggctgccgatggttatcttccagattggctcgaggacaaccttagtgaaggaattcgcgagtggtgggctttgaaacctggagcccctcaacccaaggcaaatcaacaacatcaagacaacgctcgaggtcttgtgcttccgggttacaaataccttggacccggcaacggactcgacaagggggagccggtcaacgcagcagacgcggcggccctcgagcacgacaaggcctacgaccagcagctcaaggccggagacaacccgtacctcaagtacaaccacgccgacgccgagttccaggagcggctcaaagaagatacgtcttttgggggcaacctcgggcgagcagtcttccaggccaaaaagaggcttcttgaacctcttggtctggttgaggaagcggctaagatggcagctgcggccgccgcggctgcagcggctgcagccgccgcagctgcggctgcagcgggcggcggcggcagcgctcctggaaagaagaggcctgtagagcagtctcctcaggaaccggactcctccgcgggtattggcaaatcgggtgcacagcccgctaaaaagagactcaatttcggtcagactggcgacacagagtcagtcccagaccctcaaccaatcggagaacctcccgcagccccctcaggtgtgggatctcttacaatggcttcaggtggtggcgcaccagtggcagacaataacgaaggtgccgatggagtgggtagttcctcgggaaattggcattgcgattcccaatggctgggggacagagtcatcaccaccagcacccgaacctgggccctgcccacctacaacaatcacctctacaagcaaatctccaacagcacatctggaggatcttcaaatgacaacgcctacttcggctacagcaccccctgggggtattttgacttcaacagattccactgccacttctcaccacgtgactggcagcgactcatcaacaacaactggggattccggcctaagcgactcaacttcaagctcttcaacattcaggtcaaagaggttacggacaacaatggagtcaagaccatcgccaataaccttaccagcacggtccaggtcttcacggactcagactatcagctcccgtacgtgctcgggtcggctcacgagggctgcctcccgccgttcccagcggacgttttcatgattcctcagtacgggtatctgacgcttaatgatggaagccaggccgtgggtcgttcgtccttttactgcctggaatatttcccgtcgcaaatgctaagaacgggtaacaacttccagttcaactacgagtttgagaacgtacctttccatagcagctacgctcacagccaaagcctggaccgactaatgaatccactcatcgaccaatacttgtactatctctcaaagactattaacgattctggacagaatcaacaaacgctaaaattcagtgtggccggacccagcaacatggctgtccagggaagaaactacatacctggacccagctaccgacaacaacgtgtctcaaccactgtgactcaaaacaacaacagcgaatttgcttggcctggagcttcttcttgggctctcaatggacgtaatagcttgatgaatcctggacctgctatggccagccacaaagaaggagaggaccgtttctttcctttgtctggatctttaatttttggcaaacaaggaactggaagagacaacgtggatgcggacgaagtcatgataaccaacgaagaagaaattaaaactactaacccggtagcaacggagtcctatggacaagtggccataaaccaccagagtgcccaagcacaggcgcagaccggctgggttcaaaaccaaggaatacttccgggtatggtttggcaggacagagatgtgtacctgcaaggacccatttgggccaaaattcctcacacggacggcaactttcacccttctccgctgatgggagggtttggaatgaagcacccgcctcctcagatcctcatcaaaaacacacctgtacctgcggatcctccaacggccttcaacaaggacaagctgaactctttcatcacccagtattctactggccaagtcagcgtggagatcgagtgggagctgcagaaggaaaacagcaagcgctggaacccggagatccagtacacttccaactattacaagtctaataatgttgaatttgctgttaatactgaaggtgtatatagtgaaccccgccccattggcaccagatacctgactcgtaatctgtaa

SEQ ID NO: 971 - protein, 726 aa, Artificial Sequence
  source: /note="Description of Artificial Sequence: Synthetic polypeptide"
MEVQLQASGGGLVQAGGSLRLSCAASGFKITHYTMGWFRQAPGKEREFVSRITWGGDNTFYSNSVKGRFTISRDNAKNTVYLQMNSLKPEDTADYYCAAGSTSTATPLRVDYWGKGTQVTVSSGGGGSAPGKKRPVEQSPQEPDSSSGIGKTGQQPAKKRLNFGQTGDSESVPDPQPLGEPPAAPSGLGPNTMASGGGAPMADNNEGADGVGNSSGNWHCDSTWLGDRVITTSTRTWALPTYNNHLYKQISNGTSGGSTNDNTYFGYSTPWGYFDFNRFHCHFSPRDWQRLINNNWGFRPKRLNFKLFNIQVKEVTTNEGTKTIANNLTSTVQVFTDSEYQLPYVLGSAHQGCLPPFPADVFMVPQYGYLTLNNGSQALGRSSFYCLEYFPSQMLRTGNNFQFSYTFEDVPFHSSYAHSQSLDRLMNPLIDQYLYYLVRTQTTGTGGTQTLAFSQAGPSSMANQARNWVPGPCYRQQRVSTTTNQNNNSNFAWTGAAKFKLNGRDSLMNPGVAMASHKDDDDRFFPSSGVLIFGKQGAGNDGVDYSQVLITDEEEIKATNPVATEEYGAVAINNQAANTQAQTGLVHNQGVIPGMVWQNRDVYLQGPIWAKIPHTDGNFHPSPLMGGFGLKHPPPQILIKNTPVPADPPLTFNQAKLNSFITQYSTGQVSVEIEWELQKENSKRWNPEIQYTSNYYKSTNVDFAVNTEGVYSEPRPIGTRYLTRNL

SEQ ID NO: 972 - protein, 729 aa, Artificial Sequence
  source: /note="Description of Artificial Sequence: Synthetic polypeptide"
MEVQLQASGGGLVQAGGSLRLSCSASVRTFSIYAMGWFRQAPGKEREFVAGINRSGDVTKYADFVKGRFSISRDNAKNMVYLQMNSLKPEDTALYYCAATWAYDTVGALTSGYNFWGQGTQVTVSSGGGGSAPGKKRPVEQSPQEPDSSSGIGKTGQQPAKKRLNFGQTGDSESVPDPQPLGEPPAAPSGLGPNTMASGGGAPMADNNEGADGVGNSSGNWHCDSTWLGDRVITTSTRTWALPTYNNHLYKQISNGTSGGSTNDNTYFGYSTPWGYFDFNRFHCHFSPRDWQRLINNNWGFRPKRLNFKLFNIQVKEVTTNEGTKTIANNLTSTVQVFTDSEYQLPYVLGSAHQGCLPPFPADVFMVPQYGYLTLNNGSQALGRSSFYCLEYFPSQMLRTGNNFQFSYTFEDVPFHSSYAHSQSLDRLMNPLIDQYLYYLVRTQTTGTGGTQTLAFSQAGPSSMANQARNWVPGPCYRQQRVSTTTNQNNNSNFAWTGAAKFKLNGRDSLMNPGVAMASHKDDDDRFFPSSGVLIFGKQGAGNDGVDYSQVLITDEEEIKATNPVATEEYGAVAINNQAANTQAQTGLVHNQGVIPGMVWQNRDVYLQGPIWAKIPHTDGNFHPSPLMGGFGLKHPPPQILIKNTPVPADPPLTFNQAKLNSFITQYSTGQVSVEIEWELQKENSKRWNPEIQYTSNYYKSTNVDFAVNTEGVYSEPRPIGTRYLTRNL

SEQ ID NO: 973 - protein, 651 aa, Artificial Sequence
  source: /note="Description of Artificial Sequence: Synthetic polypeptide"
MPSSVIDALQYKLEGTTRLTRKRGLKLATALSLSNKFVEGSPSGGGGSGGGGSAPGKKRPVEQSPQEPDSSSGIGKTGQQPAKKRLNFGQTGDSESVPDPQPLGEPPAAPSGLGPNTMASGGGAPMADNNEGADGVGNSSGNWHCDSTWLGDRVITTSTRTWALPTYNNHLYKQISNGTSGGSTNDNTYFGYSTPWGYFDFNRFHCHFSPRDWQRLINNNWGFRPKRLNFKLFNIQVKEVTTNEGTKTIANNLTSTVQVFTDSEYQLPYVLGSAHQGCLPPFPADVFMVPQYGYLTLNNGSQALGRSSFYCLEYFPSQMLRTGNNFQFSYTFEDVPFHSSYAHSQSLDRLMNPLIDQYLYYLVRTQTTGTGGTQTLAFSQAGPSSMANQARNWVPGPCYRQQRVSTTTNQNNNSNFAWTGAAKFKLNGRDSLMNPGVAMASHKDDDDRFFPSSGVLIFGKQGAGNDGVDYSQVLITDEEEIKATNPVATEEYGAVAINNQAANTQAQTGLVHNQGVIPGMVWQNRDVYLQGPIWAKIPHTDGNFHPSPLMGGFGLKHPPPQILIKNTPVPADPPLTFNQAKLNSFITQYSTGQVSVEIEWELQKENSKRWNPEIQYTSNYYKSTNVDFAVNTEGVYSEPRPIGTRYLTRNL

SEQ ID NO: 974 - protein, 638 aa, Artificial Sequence
  source: /note="Description of Artificial Sequence: Synthetic polypeptide"
MYTIWMPENPRPGTPCDIFTNSRGKRASNGGGGGSGGGGSAPGKKRPVEQSPQEPDSSSGIGKTGQQPAKKRLNFGQTGDSESVPDPQPLGEPPAAPSGLGPNTMASGGGAPMADNNEGADGVGNSSGNWHCDSTWLGDRVITTSTRTWALPTYNNHLYKQISNGTSGGSTNDNTYFGYSTPWGYFDFNRFHCHFSPRDWQRLINNNWGFRPKRLNFKLFNIQVKEVTTNEGTKTIANNLTSTVQVFTDSEYQLPYVLGSAHQGCLPPFPADVFMVPQYGYLTLNNGSQALGRSSFYCLEYFPSQMLRTGNNFQFSYTFEDVPFHSSYAHSQSLDRLMNPLIDQYLYYLVRTQTTGTGGTQTLAFSQAGPSSMANQARNWVPGPCYRQQRVSTTTNQNNNSNFAWTGAAKFKLNGRDSLMNPGVAMASHKDDDDRFFPSSGVLIFGKQGAGNDGVDYSQVLITDEEEIKATNPVATEEYGAVAINNQAANTQAQTGLVHNQGVIPGMVWQNRDVYLQGPIWAKIPHTDGNFHPSPLMGGFGLKHPPPQILIKNTPVPADPPLTFNQAKLNSFITQYSTGQVSVEIEWELQKENSKRWNPEIQYTSNYYKSTNVDFAVNTEGVYSEPRPIGTRYLTRNL

SEQ ID NO: 975 - protein, 628 aa, Artificial Sequence
  source: /note="Description of Artificial Sequence: Synthetic polypeptide"
MTFFYGGSRGKRNNFKTEEYGGGGSGGGGSAPGKKRPVEQSPQEPDSSSGIGKTGQQPAKKRLNFGQTGDSESVPDPQPLGEPPAAPSGLGPNTMASGGGAPMADNNEGADGVGNSSGNWHCDSTWLGDRVITTSTRTWALPTYNNHLYKQISNGTSGGSTNDNTYFGYSTPWGYFDFNRFHCHFSPRDWQRLINNNWGFRPKRLNFKLFNIQVKEVTTNEGTKTIANNLTSTVQVFTDSEYQLPYVLGSAHQGCLPPFPADVFMVPQYGYLTLNNGSQALGRSSFYCLEYFPSQMLRTGNNFQFSYTFEDVPFHSSYAHSQSLDRLMNPLIDQYLYYLVRTQTTGTGGTQTLAFSQAGPSSMANQARNWVPGPCYRQQRVSTTTNQNNNSNFAWTGAAKFKLNGRDSLMNPGVAMASHKDDDDRFFPSSGVLIFGKQGAGNDGVDYSQVLITDEEEIKATNPVATEEYGAVAINNQAANTQAQTGLVHNQGVIPGMVWQNRDVYLQGPIWAKIPHTDGNFHPSPLMGGFGLKHPPPQILIKNTPVPADPPLTFNQAKLNSFITQYSTGQVSVEIEWELQKENSKRWNPEIQYTSNYYKSTNVDFAVNTEGVYSEPRPIGTRYLTRNL

SEQ ID NO: 976 - protein, 621 aa, Artificial Sequence
  source: /note="Description of Artificial Sequence: Synthetic polypeptide"
MNNQKIVNLKEKVAQLEAGGGGSAPGKKRPVEQSPQEPDSSAGIGKSGAQPAKKRLNFGQTGDTESVPDPQPIGEPPAAPSGVGSLTMASGGGAPVADNNEGADGVGSSSGNWHCDSQWLGDRVITTSTRTWALPTYNNHLYKQISNSTSGGSSNDNAYFGYSTPWGYFDFNRFHCHFSPRDWQRLINNNWGFRPKRLNFKLFNIQVKEVTDNNGVKTIANNLTSTVQVFTDSDYQLPYVLGSAHEGCLPPFPADVFMIPQYGYLTLNDGSQAVGRSSFYCLEYFPSQMLRTGNNFQFNYEFENVPFHSSYAHSQSLDRLMNPLIDQYLYYLSKTINDSGQNQQTLKFSVAGPSNMAVQGRNYIPGPSYRQQRVSTTVTQNNNSEFAWPGASSWALNGRNSLMNPGPAMASHKEGEDRFFPLSGSLIFGKQGTGRDNVDADEVMITNEEEIKTTNPVATESYGQVAINHQSAQAQAQTGWVQNQGILPGMVWQDRDVYLQGPIWAKIPHTDGNFHPSPLMGGFGMKHPPPQILIKNTPVPADPPTAFNKDKLNSFITQYSTGQVSVEIEWELQKENSKRWNPEIQYTSNYYKSNNVEFAVNTEGVYSEPRPIGTRYLTRNL

SEQ ID NO: 977 - protein, 633 aa, Artificial Sequence
  source: /note="Description of Artificial Sequence: Synthetic polypeptide"
MYTIWMPENPRPGTPCDIFTNSRGKRASNGGGGGSAPGKKRPVEQSPQEPDSSAGIGKSGAQPAKKRLNFGQTGDTESVPDPQPIGEPPAAPSGVGSLTMASGGGAPVADNNEGADGVGSSSGNWHCDSQWLGDRVITTSTRTWALPTYNNHLYKQISNSTSGGSSNDNAYFGYSTPWGYFDFNRFHCHFSPRDWQRLINNNWGFRPKRLNFKLFNIQVKEVTDNNGVKTIANNLTSTVQVFTDSDYQLPYVLGSAHEGCLPPFPADVFMIPQYGYLTLNDGSQAVGRSSFYCLEYFPSQMLRTGNNFQFNYEFENVPFHSSYAHSQSLDRLMNPLIDQYLYYLSKTINDSGQNQQTLKFSVAGPSNMAVQGRNYIPGPSYRQQRVSTTVTQNNNSEFAWPGASSWALNGRNSLMNPGPAMASHKEGEDRFFPLSGSLIFGKQGTGRDNVDADEVMITNEEEIKTTNPVATESYGQVAINHQSAQAQAQTGWVQNQGILPGMVWQDRDVYLQGPIWAKIPHTDGNFHPSPLMGGFGMKHPPPQILIKNTPVPADPPTAFNKDKLNSFITQYSTGQVSVEIEWELQKENSKRWNPEIQYTSNYYKSNNVEFAVNTEGVYSEPRPIGTRYLTRNL

SEQ ID NO: 978 - protein, 623 aa, Artificial Sequence
  source: /note="Description of Artificial Sequence: Synthetic polypeptide"
MTFFYGGSRGKRNNFKTEEYGGGGSAPGKKRPVEQSPQEPDSSAGIGKSGAQPAKKRLNFGQTGDTESVPDPQPIGEPPAAPSGVGSLTMASGGGAPVADNNEGADGVGSSSGNWHCDSQWLGDRVITTSTRTWALPTYNNHLYKQISNSTSGGSSNDNAYFGYSTPWGYFDFNRFHCHFSPRDWQRLINNNWGFRPKRLNFKLFNIQVKEVTDNNGVKTIANNLTSTVQVFTDSDYQLPYVLGSAHEGCLPPFPADVFMIPQYGYLTLNDGSQAVGRSSFYCLEYFPSQMLRTGNNFQFNYEFENVPFHSSYAHSQSLDRLMNPLIDQYLYYLSKTINDSGQNQQTLKFSVAGPSNMAVQGRNYIPGPSYRQQRVSTTVTQNNNSEFAWPGASSWALNGRNSLMNPGPAMASHKEGEDRFFPLSGSLIFGKQGTGRDNVDADEVMITNEEEIKTTNPVATESYGQVAINHQSAQAQAQTGWVQNQGILPGMVWQDRDVYLQGPIWAKIPHTDGNFHPSPLMGGFGMKHPPPQILIKNTPVPADPPTAFNKDKLNSFITQYSTGQVSVEIEWELQKENSKRWNPEIQYTSNYYKSNNVEFAVNTEGVYSEPRPIGTRYLTRNL

SEQ ID NO: 979 - protein, 623 aa, Artificial Sequence
  source: /note="Description of Artificial Sequence: Synthetic polypeptide"
MAAAAAAAAAAAAAAAAAAAGGGGSAPGKKRPVEQSPQEPDSSAGIGKSGAQPAKKRLNFGQTGDTESVPDPQPIGEPPAAPSGVGSLTMASGGGAPVADNNEGADGVGSSSGNWHCDSQWLGDRVITTSTRTWALPTYNNHLYKQISNSTSGGSSNDNAYFGYSTPWGYFDFNRFHCHFSPRDWQRLINNNWGFRPKRLNFKLFNIQVKEVTDNNGVKTIANNLTSTVQVFTDSDYQLPYVLGSAHEGCLPPFPADVFMIPQYGYLTLNDGSQAVGRSSFYCLEYFPSQMLRTGNNFQFNYEFENVPFHSSYAHSQSLDRLMNPLIDQYLYYLSKTINDSGQNQQTLKFSVAGPSNMAVQGRNYIPGPSYRQQRVSTTVTQNNNSEFAWPGASSWALNGRNSLMNPGPAMASHKEGEDRFFPLSGSLIFGKQGTGRDNVDADEVMITNEEEIKTTNPVATESYGQVAINHQSAQAQAQTGWVQNQGILPGMVWQDRDVYLQGPIWAKIPHTDGNFHPSPLMGGFGMKHPPPQILIKNTPVPADPPTAFNKDKLNSFITQYSTGQVSVEIEWELQKENSKRWNPEIQYTSNYYKSNNVEFAVNTEGVYSEPRPIGTRYLTRNL

SEQ ID NO: 980 - DNA, 2214 bp, Artificial Sequence
  source: /note="Description of Artificial Sequence: Synthetic polynucleotide"
atggctgccgatggttatcttccagattggctcgaggacaacctctctgagggcattcgcgagtggtgggacttgaaacctggagccccgaagcccaaagccaaccagcaaaagcaggacgacggccggggtctggtgcttcctggctacaagtacctcggacccttcaacggactcgacaagggggagcccgtcaacgcggcggacgcagcggccctcgagcacgacaaggcctacgaccagcagctcaaagcgggtgacaatccgtacctgcggtataaccacgccgacgtcgagtttcaggagcgtctgcaagaagatacgtcttttgggggcaacctcgggcgagcagtcttccaggccaagaagagggttctcgaaccttttggtctggttgaggaaggcgctaagacggctcctggaaagaaacgtccggtagagcagtcgccacaagagccagactcctcctcgggcatcggcaagaaaggccaacagcccgccagaaaaagactcaattttggccagactggcgactcagagtcagttccagaccctcaacctctcggagaacctccagcagcgccctctggtgtgggacctaatacaatggctgcaggcggtggcgcaccaatggcagacaataacgagggcgccgacggagtgggtaattcctcgggaaattggcattgcgattccacatggatgggggacagagtcatcaccaccagcacccgaacctgggccctgcccacctacaacaaccacctctacaagcaaatctccaacggcacctcgggaggaagcaccaacgacaacacctattttggctacagcaccccctgggggtattttgatttcaacagattccactgccacttctcaccacgtgactggcagcgactcatcaacaacaactggggattccggccaaaaagactcagcttcaagctcttcaacatccaggtcaaggaggtcacgcagaatgaaggcaccaagaccatcgccaataaccttaccagcacgattcaggtatttacggactcggaataccagctgccatacgtcctcggctccgcgcaccagggctgcctgcctccgttcccggcggacgtcttcatgattccccagtacggctaccttacactgaacaatggaagtcaagccgtaggccgttcctccttctactgcctggaatattttccttctcaaatgctgagaacgggcaacaactttgagttcagctaccagtttgaggacgtgccttttcacagcagctacgcgcacagccaaagcctggaccggctgatgaaccccctcatcgaccagtacctgtactacctgtctcggactcagtccacgggaggtaccgcaagaactcagcagttgctattttctcaggccgggcctaatacaatggccaatcaggcaaagaactggctgccaggaccctgttaccgccaacaacgcgtctcaacgacaaccgggcaaaacaacaatagcaactctgcctggactgctgggaccaaataccatctgaatggaagaaattcattggctaatcctggcatcgctatggcaacacacaaagacgacgaggagcgtttttttcccagtaacgggatcctgatttttggcaaacaaaatgctgccagagacaatgcggattacagcgatgtcatgctcaccagcgaggaagaaatcaaaaccactaaccctgtggctacagaggaatacggtatcgtggcagataacttgcagcagcaaaacacggctcctcaaattggaactgtcaacagccagggggccttacccggtatggtctggcagaaccgggacgtgtacctgcagggtcccatctgggccaagattcctcacacggacggcaacttccacccatctccgctgatgggcggctttggcctgaaacatcctccgcctcagatcctgatcaagaacacgcctgtacctgcggatcctccgaccaccttcaaccagtcaaagctgaactctttcatcacgcaatacagcaccggacaggtcagcgtggaaattgaatgggagctacagaaggaaaacagcaagcgctggaaccccgagatccagtacacctccaactactacaaatctacaagtgtggactttgctgttaatacagaaggcgtgtactctgaaccccgccccattggcacccgttacctcacccgtaatctgtaa

SEQ ID NO: 981 - DNA, 2214 bp, Artificial Sequence
  source: /note="Description of Artificial Sequence: Synthetic polynucleotide"
atggctgccgatggttatcttccagattggctcgaggacaacctctctgagggcattcgcgagtggtgggcgctgaaacctggagccccgaagcccaaagccaaccagcaaaagcaggacgacggccggggtctggtgcttcctggctacaagtacctcggacccttcaacggactcgacaagggggagcccgtcaacgcggcggacgcagcggccctcgagcacgacaaggcctacgaccagcagctcaaagcgggtgacaatccgtacctgcggtataaccacgccgacgccgagtttcaggagcgtctgcaagaagatacgtcttttgggggcaacctcgggcgagcagtcttccaggccaagaagcgggttctcgaacctctcggtctggttgaggacggcgctaagacggctcctggaaagaagagaccagtagagcagtcaccccaagaaccagactcctcctcgggcatcggcaagaaaggccaacagcccgccagaaaaagactcaattttggccagactggcgactcagagtcagttccagaccctcaacctctcggagaacctccagcaacccccgctgctgtgggacctactacaatggcttcaggcggtggcgcaccaatggcagacaataacgaaggcgccgacggagtgggtagttcctcgggaaattggcattgcgattccacatggctgggcgacagagtcatcaccaccagcacccgaacctgggccctgcccacctacaacaaccacctctacaagcaaatctccaacgggacatcgggaggagccaccaacgacaacacctacttcggctacagcaccccctgggggtattttgactttaacagattccactgccacttttcaccacgtgactggcagcgactcatcaacaacaactggggattccggcccaagagactcagcttcaagctcttcaacatccaggtcaaggaggtcacgcagaatgaaggcaccaagaccatcgccaataacctcaccagcaccatccaggtgtttacggactcggagtaccagctgccgtacgttctcggctctgcccaccagggctgcctgcctccgttcccggcggacgtgttcatgattccccagtacggctacctaacactcaacaacggtagtcaggccgtgggacgctcctccttctactgcctggaatactttccttcgcagatgctgagaaccggcaacaacttccagtttacttacaccttcgaggacgtgcctttccacagcagctacgcccacagccagagcttggaccggctgatgaatcctctgattgaccagtacctgtactacttgtctcggactcaaacaacaggaggcacggcaaatacgcagactctgggcttcagccaaggtgggcctaatacaatggccaatcaggcaaagaactggctgccaggaccctgttaccgccaacaacgcgtctcaacgacaaccgggcaaaacaacaatagcaactttgcctggactgctgggaccaaataccatctgaatggaagaaattcattggctaatcctggcatcgctatggcaacacacaaggacgacgaggagcgtttttttcccagtaacgggatcctgatttttggcaaacaaaatgctgccagagacaatgcggattacagcgatgtcatgctcaccagcgaggaagaaatcaaaaccactaaccctgtggctacagaggaatacggtatcgtggcagataacttgcagcagcaaaacacggctcctcaaattggaactgtcaacagccagggggccttacccggtatggtctggcagaaccgggacgtgtacctgcagggtcccatctgggccaagattcctcacacggacggcaacttccacccgtctccgctgatgggcggctttggcctgaaacatcctccgcctcagatcctgatcaagaacacgcctgtacctgcggatcctccgaccaccttcaaccagtcaaagctgaactctttcatcacgcaatacagcaccggacaggtcagcgtggaaatcgagtgggagctgcagaaagaaaacagcaagcgctggaaccccgagatccagtacacctccaactactacaaatctacaaatgtggactttgctgtcaacacggagggggtttatagcgagcctcgccccattggcacccgttacctcacccgcaacctgtaa

SEQ ID NO: 982 - DNA, 2211 bp, Artificial Sequence
  source: /note="Description of Artificial Sequence: Synthetic polynucleotide"
  modified_base (715)..(715): a, c, t, or g
atggctgccgatggttatcttccagattggctcgaggacaacctctctgagggcattcgcgagtggtgggcgctgaaacctggagccccgaagcccaaagccaaccagcaaaagcaggacgacggccggggtctggtgcttcctggctacaagtacctcggacccttcaacggactcgacaagggggagcccgtcaacgcggcggacgcagcggccctcgagcacgacaaggcctacgaccagcagctcaaagcgggtgacaatccgtacctgcggtataaccacgccgacgccgagtttcaggagcgtctgcaagaagatacgtcttttgggggcaacctcgggcgagcagtcttccaggccaagaagcgggttctcgaacctctcggtctggttgaggaaggcgctaagacggctcctggaaagaaacgtccggtagagcagtcgccacaagagccagactcctcctcgggcatcggcaagacaggccagcagcccgctaaaaagaggctcaattttggtcagactggcgactcagagtcagtccccgacccacaacctctcggagaacctccagcaacccccgctgctgtgggacctactacaatggcttcaggcggtggcgcaccaatggcagacaataacgaaggcgccgacggagtgggtaatgcctcaggaaattggcattgcgattccacatggctgggcgacagantcatcaccaccagcacccgaacatgggccttgcccacctataacaaccacctctacaagcaaatctccagtgcttcaacgggggccagcaacgacaaccactacttcggctacagcaccccctgggggtattttgatttcaacagattccactgccatttctcaccacgtgactggcagcgactcatcaacaacaattggggattccggcccaagagactcaacttcaagctcttcaacatccaagtcaaggaggtcacgcagaatgaaggcaccaagaccatcgccaataacctcaccagcaccatccaggtgtttacggactcggagtaccagctgccgtacgttctcggctctgcccaccagggctgcctgcctccgttcccggcggacgtgttcatgattccccagtacggctacctaacactcaacaacggtagtcaggccgtgggacgctcctccttctactgcctggaatattttccatctcaaatgctgcgaactggaaacaattttgaattcagctacaccttcgaggacgtgcctttccacagcagctacgcacacagccagagcttggaccgactgatgaatcctctcatcgaccagtacctgtactacttgtctcggactcaaacaacaggaggcacggcaaatacgcagactctgggcttcagccaaggtgggcctaatacaatggccaatcaggcaaagaactggctgccaggaccctgttaccgccaacaacgcgtctcaacgacaaccgggcaaaacaacaatagcaactttgcctggactgctgggaccaaataccatctgaatggaagaaattcattggctaatcctggcatcgctatggcaacacacaaagacgacgaggagcgtttttttcccagtaacgggatcctgatttttggcaaacaaaatgctgccagagacaatgcggattacagcgatgtcatgctcaccagcgaggaagaaatcaaaaccactaaccctgtggctacagaggaatacggtatcgtggcagataacttgcagcagcaaaacacggctcctcaaattggaactgtcaacagccaggggaccttacccggtatggtctggcagaaccgggacgtgtacctgcagggtcccatctgggccaagattcctcacacggacggcaacttccacccgtctccgctgatgggcggctttggcctgaaacatcctccgcctcagatcctgatcaagaacacgcctgtacctgcggatcctccgaccaccttcaaccagtcaaagctgaactctttcatcacgcaatacagcaccggacaggtcagcgtggaaattgaatgggagctacagaaggaaaacagcaagcgctggaaccccgagatccagtacacctccaattactacaaatctacaagtgtggactttgctgttaatacagaaggcgtgtactctgaaccccgccccattggcacgcgtttcctcacccgtaatctgtaa

SEQ ID NO: 983 - DNA, 2214 bp, Artificial Sequence
  source: /note="Description of Artificial Sequence: Synthetic polynucleotide"
atggctgccgatggttatcttccagattggctcgaggacaacctctctgagggcattcgcgagtggtgggcgctgaaacctggagccccgaagcccaaagccaaccagcaaaagcaggacgacggccggggtctggtgcttcctggctacaagtacctcggacccttcaacggactcgacaagggggagcccgtcaacgcggcggacgcagcggccctcgagcacgacaaggcctacgaccagcagctcaaagcgggtgacaatccgtacctgcggtataaccacgccgacgccgagtttcaggagcgtctgcaagaagatacgtcttttgggggcaacctcgggcgagcagtcttccaggccaagaagcgggttctcgaacctctcggtctggttgaggaaggcgctaagacggctcctggaaagaaacgtccggtagagcagtcgccacaagagccagactcctcctcgggcatcggcaagacaggccagcagcccgctaaaaagaggctcaattttggccagactggcgactcagagtcagttccagaccctcaacctctcggagaacctccagcagcgccctctggtgtgggacctaatacaatggctgcaggcggtggcgcaccaatggcagacaataacgaaggcgccgacggagtgggtagttcctcgggaaattggcattgcgattccacatggctgggcgacagagtcatcaccaccagcacccgaacctgggccctgcccacctacaacaaccacctctacaagcaaatctccaacgggacatcgggaggagccaccaacgacaacacctacttcggctacagcaccccctgggggtattttgactttaacagattccactgccacttttcaccacgtgactggcagcgactcatcaacaacaactggggattccggcccaagagactcagcttcaagctcttcaacatccaggtcaaggaggtcacgcagaatgaaggcaccaagaccatcgccaataacctcaccagcaccatccaggtgtttacggactcggagtaccagctgccgtacgtactaggatccgctcaccagggatgtctgcctccgttcccggcggacgtgttcatgattccccagtacggctacctaacactcaacaacggtagtcaggccgtgggacgctcctccttctactgcctggaatattttccatctcagatgctgagaacgggcaataactttaccttcagctacaccttcgaggacgtgcctttccacagcagctatgcccacagccagagcttggaccggctgatgaatcctctgattgaccagtacctgtactacttgtctcggactcaaacaacaggaggcacggcaaatacgcagactctgggcttcagccaaggtgggcctaatacaatggccaatcaggcaaagaactggctgccaggaccctgttaccgccaacaacgcgtctcaacgacaaccgggcaaaacaacaatagcaactttgcctggactgctgggaccaaataccatctgaatggaagaaattcattggctaatcctggcatcgctatggcaacacacaaagacgacgaggagcgtttttttcccagtaacgggatcctgatttttggcaaacaaaatgctgccagagacaatgcggattacagcgatgtcatgctcaccagcgaggaagaaatcaaaaccactaaccctgtggctacagaggaatacggtatcgtggcagataacttgcagcagcaaaacacggctcctcaaattggaactgtcaacagccagggggccttacccggtatggtctggcagaaccgggacgtgtacctgcagggtcccatctgggccaagattcctcacacggacggcaacttccacccgtctccgctaatgggaggatttggactgaagcacccacctcctcagatcctgatcaagaacacgccggtacctgcggatcctccgaccaccttcaaccagtcaaagctgtactctttcatcacgcaatacagcaccggacaggtcagcgtggaaattgaatgggagctgcagaaggaaaacagcaagcgctggaaccccgagatccaatacacctccaactactacaaatctacaagtgtggactttgctgttaatacagaaggcgtgtactctgaaccccgccccattggcacccgttacctcacccgtaatctgtaa

SEQ ID NO: 984 - protein, 737 aa, Artificial Sequence
  source: /note="Description of Artificial Sequence: Synthetic polypeptide"
MAADGYLPDWLEDNLSEGIREWWDLKPGAPKPKANQQKQDDGRGLVLPGYKYLGPFNGLDKGEPVNAADAAALEHDKAYDQQLKAGDNPYLRYNHADVEFQERLQEDTSFGGNLGRAVFQAKKRVLEPFGLVEEGAKTAPGKKRPVEQSPQEPDSSSGIGKKGQQPARKRLNFGQTGDSESVPDPQPLGEPPAAPSGVGPNTMAAGGGAPMADNNEGADGVGNSSGNWHCDSTWMGDRVITTSTRTWALPTYNNHLYKQISNGTSGGSTNDNTYFGYSTPWGYFDFNRFHCHFSPRDWQRLINNNWGFRPKRLSFKLFNIQVKEVTQNEGTKTIANNLTSTIQVFTDSEYQLPYVLGSAHQGCLPPFPADVFMIPQYGYLTLNNGSQAVGRSSFYCLEYFPSQMLRTGNNFEFSYQFEDVPFHSSYAHSQSLDRLMNPLIDQYLYYLSRTQSTGGTARTQQLLFSQAGPNTMANQAKNWLPGPCYRQQRVSTTTGQNNNSNSAWTAGTKYHLNGRNSLANPGIAMATHKDDEERFFPSNGILIFGKQNAARDNADYSDVMLTSEEEIKTTNPVATEEYGIVADNLQQQNTAPQIGTVNSQGALPGMVWQNRDVYLQGPIWAKIPHTDGNFHPSPLMGGFGLKHPPPQILIKNTPVPADPPTTFNQSKLNSFITQYSTGQVSVEIEWELQKENSKRWNPEIQYTSNYYKSTSVDFAVNTEGVYSEPRPIGTRYLTRNL

SEQ ID NO: 985 - protein, 737 aa, Artificial Sequence
  source: /note="Description of Artificial Sequence: Synthetic polypeptide"
MAADGYLPDWLEDNLSEGIREWWALKPGAPKPKANQQKQDDGRGLVLPGYKYLGPFNGLDKGEPVNAADAAALEHDKAYDQQLKAGDNPYLRYNHADAEFQERLQEDTSFGGNLGRAVFQAKKRVLEPLGLVEDGAKTAPGKKRPVEQSPQEPDSSSGIGKKGQQPARKRLNFGQTGDSESVPDPQPLGEPPATPAAVGPTTMASGGGAPMADNNEGADGVGSSSGNWHCDSTWLGDRVITTSTRTWALPTYNNHLYKQISNGTSGGATNDNTYFGYSTPWGYFDFNRFHCHFSPRDWQRLINNNWGFRPKRLSFKLFNIQVKEVTQNEGTKTIANNLTSTIQVFTDSEYQLPYVLGSAHQGCLPPFPADVFMIPQYGYLTLNNGSQAVGRSSFYCLEYFPSQMLRTGNNFQFTYTFEDVPFHSSYAHSQSLDRLMNPLIDQYLYYLSRTQTTGGTANTQTLGFSQGGPNTMANQAKNWLPGPCYRQQRVSTTTGQNNNSNFAWTAGTKYHLNGRNSLANPGIAMATHKDDEERFFPSNGILIFGKQNAARDNADYSDVMLTSEEEIKTTNPVATEEYGIVADNLQQQNTAPQIGTVNSQGALPGMVWQNRDVYLQGPIWAKIPHTDGNFHPSPLMGGFGLKHPPPQILIKNTPVPADPPTTFNQSKLNSFITQYSTGQVSVEIEWELQKENSKRWNPEIQYTSNYYKSTNVDFAVNTEGVYSEPRPIGTRYLTRNL

SEQ ID NO: 986 - protein, 736 aa, Artificial Sequence
  source: /note="Description of Artificial Sequence: Synthetic polypeptide"
  MOD_RES (239)..(239): Any naturally occurring amino acid
MAADGYLPDWLEDNLSEGIREWWALKPGAPKPKANQQKQDDGRGLVLPGYKYLGPFNGLDKGEPVNAADAAALEHDKAYDQQLKAGDNPYLRYNHADAEFQERLQEDTSFGGNLGRAVFQAKKRVLEPLGLVEEGAKTAPGKKRPVEQSPQEPDSSSGIGKTGQQPAKKRLNFGQTGDSESVPDPQPLGEPPATPAAVGPTTMASGGGAPMADNNEGADGVGNASGNWHCDSTWLGDRXITTSTRTWALPTYNNHLYKQISSASTGASNDNHYFGYSTPWGYFDFNRFHCHFSPRDWQRLINNNWGFRPKRLNFKLFNIQVKEVTQNEGTKTIANNLTSTIQVFTDSEYQLPYVLGSAHQGCLPPFPADVFMIPQYGYLTLNNGSQAVGRSSFYCLEYFPSQMLRTGNNFEFSYTFEDVPFHSSYAHSQSLDRLMNPLIDQYLYYLSRTQTTGGTANTQTLGFSQGGPNTMANQAKNWLPGPCYRQQRVSTTTGQNNNSNFAWTAGTKYHLNGRNSLANPGIAMATHKDDEERFFPSNGILIFGKQNAARDNADYSDVMLTSEEEIKTTNPVATEEYGIVADNLQQQNTAPQIGTVNSQGTLPGMVWQNRDVYLQGPIWAKIPHTDGNFHPSPLMGGFGLKHPPPQILIKNTPVPADPPTTFNQSKLNSFITQYSTGQVSVEIEWELQKENSKRWNPEIQYTSNYYKSTSVDFAVNTEGVYSEPRPIGTRFLTRNL

SEQ ID NO: 987 - protein, 737 aa, Artificial Sequence
  source: /note="Description of Artificial Sequence: Synthetic polypeptide"
MAADGYLPDWLEDNLSEGIREWWALKPGAPKPKANQQKQDDGRGLVLPGYKYLGPFNGLDKGEPVNAADAAALEHDKAYDQQLKAGDNPYLRYNHADAEFQERLQEDTSFGGNLGRAVFQAKKRVLEPLGLVEEGAKTAPGKKRPVEQSPQEPDSSSGIGKTGQQPAKKRLNFGQTGDSESVPDPQPLGEPPAAPSGVGPNTMAAGGGAPMADNNEGADGVGSSSGNWHCDSTWLGDRVITTSTRTWALPTYNNHLYKQISNGTSGGATNDNTYFGYSTPWGYFDFNRFHCHFSPRDWQRLINNNWGFRPKRLSFKLFNIQVKEVTQNEGTKTIANNLTSTIQVFTDSEYQLPYVLGSAHQGCLPPFPADVFMIPQYGYLTLNNGSQAVGRSSFYCLEYFPSQMLRTGNNFTFSYTFEDVPFHSSYAHSQSLDRLMNPLIDQYLYYLSRTQTTGGTANTQTLGFSQGGPNTMANQAKNWLPGPCYRQQRVSTTTGQNNNSNFAWTAGTKYHLNGRNSLANPGIAMATHKDDEERFFPSNGILIFGKQNAARDNADYSDVMLTSEEEIKTTNPVATEEYGIVADNLQQQNTAPQIGTVNSQGALPGMVWQNRDVYLQGPIWAKIPHTDGNFHPSPLMGGFGLKHPPPQILIKNTPVPADPPTTFNQSKLYSFITQYSTGQVSVEIEWELQKENSKRWNPEIQYTSNYYKSTSVDFAVNTEGVYSEPRPIGTRYLTRNL

SEQ ID NO: 988 - DNA, 2208 bp, Artificial Sequence
  source: /note="Description of Artificial Sequence: Synthetic polynucleotide"
atggctgccgatggttatcttccagattggctcgaggacaacctctctgagggcattcgcgagtggtgggacttgaaacctggagccccgaaacccaaagccaaccagcaaaagcaggacgacggccggggtctggtgcttcctggctacaagtacctcggacccttcaacggactcgacaagggggagcccgtcaacgcggcggatgcagcggccctcgagcacgacaaagcctacgaccggcagctcgacagcggagacaacccgtacctcaagtacaaccacgccgacgcggagtttcaggagcgccttaaagaagatacgtcttttgggggcaacctcggacgagcagtcttccaggccaagaagagggttctcgaaccttttggtctggttgaggaaggtgctaagacggctcctggaaagaaacgtccggtagagcagtcgccacaagagccagactcctcctcgggcattggcaagacaggccagcagcccgctaaaaagagactcaattttggtcagactggcgactcagagtcagtccccgacccacaacctctcggagaacctccagcaacccccgctgctgtgggacctactacaatggcttcaggtggtggcgcaccagtggcagacaataacgaaggcgccgacggagtgggtagttcctcgggaaattggcattgcgattccacatggctgggcgacagagtcatcaccaccagcacccgaacatgggccttgcccacctataacaaccacctctacaagcaaatctccagtgcttcgacgggggccagcaacgacaaccactacttcggctacagcaccccctgggggtattttgatttcaacaggttccactgccatttctcaccacgtgactggcagcgactcatcaacaacaattggggattccggcccaaaagactcaacttcaagctgttcaacatccaggtcaaggaagtcacgacgaacgaaggcaccaagaccatcgccaataatctcaccagcaccgtgcaggtctttacggactcggagtaccagttaccgtacgtgctaggatccgctcaccagggatgtctgcctccgttcccggcggacgtcttcatggttcctcagtacggctatttaactttaaacaatggaagccaagccctgggacgttcctccttctactgtctggagtatttcccatcgcagatgctgagaacgggcaacaactttacctttagctacaccttcgaggacgtgcctttccacagcagctacgcgcacagccagagcctggacaggctgatgaatcccctcatcgaccagtacctgtactacctggtcagaacgcaaacgactggaactggagggacgcagactctggcattcagccaagcgggtcctagctcaatggccaaccaggctagaaattgggtgcccggaccttgctaccggcagcagcgcgtctccacgacaaccaaccagaacaacaacagcaactttgcctggacgggagctgccaagtttaagctgaacggccgagactctctaatgaatccgggcgtggcaatggcttcccacaaggatgacgacgaccgcttcttcccttcgagcggggtcctgatttttggcaagcaaggagccgggaacgatggagtggattacagccaagtgctgattacagatgaggaagaaatcaaggctaccaaccccgtggccacagaagaatatggagcagtggccatcaacaaccaggccgccaatacgcaggcgcagaccggactcgtgcacaaccagggggtgattcccggcatggtgtggcagaatagagacgtgtacctgcagggtcccatctgggccaaaattcctcacacggacggcaactttcacccgtctcccctgatgggcggctttggactgaagcacccgcctcctcaaattctcatcaagaacacaccggttccagcggacccgccgcttaccttcaaccaggccaagctgaactctttcatcacgcagtacagcaccggacaggtcagcgtggaaatcgagtgggagctgcagaaagaaaacagcaaacgctggaatccagagattcaatacacttccaactactacaaatctacaaatgtggactttgctgtcaacacggagggggtttatagcgagcctcgccccattggcacccgttacctcacccgcaacctgtaa

SEQ ID NO: 989 - DNA, 2211 bp, Artificial Sequence
  source: /note="Description of Artificial Sequence: Synthetic polynucleotide"
  modified_base (337)..(337): a, c, t, or g
atggctgccgatggttatcttccagattggctcgaggacactctctctgaaggaataagacagtggtggaagctcaaacctggcccaccaccaccaaagcccgcagagcggcataaggacgacagcaggggtcttgtgcttcctggctacaagtacctcggacccttcaacggactcgacaagggggagcccgtcaacgcggcggacgcagcgaccctcgagcacgacaaggcctacgaccagcagctcaaagcgggtgacaatccgtacctgcggtataaccacgccgacgccgagtttcaggagcgtctgcaagaagatacgtcttttgggggcnacctcgggcgagcagtcttccaggccaagaagcgggttctcgaacctctcggtctggttgaggaagctgctaagacggctcctggaaagaagagaccagtagagccatcaccccagcgttctccagactcctctacgggcatcggcaagaaaggccaacagcccgccagaaaaagactcaattttggtcagactggcgactcagagtcagttccagaccctcaacctctcggagaacctccagcagcgccctctggtgtgggacctaatacaatggctgcaggcggtggcgcaccaatggcagacaataacgaaggcgccgacggagtgggtagttcctcgggaaattggcattgcgattccacatggctgggcgacagagtcatcaccaccagcacccgaacctgggccctgcccacctacaacaaccacctctacaagcaaatctccagtgcttcaacgggggccagcaacgacaaccactacttcggctacagcaccccctgggggtattttgatttcaacagattccactgccatttctcaccacgtgactggcagcgactcatcaacaacaattggggattccggcccaagagactcaacttcaagctcttcaacatccaagtcaaggaggtcacgacgaatgatggcgtcacgaccatcgctaataaccttaccagcacggttcaagtcttctcggactcagactatcagctcccgtacgtgctcgggtcggctcacgagggctgcctcccgccgttcccagcggacgttttcatgattcctcagtacggctatttaactttaaacaatggaagccaagccctgggacgttcctccttctactgtctggagtatttcccatcgcagatgctgagaaccggcaacaactttcagttcagctacaccttcgaggacgtgcctttccacagcagctacgcgcacagccagagcctggacaggctgatgaatcccctcatcgaccagtacctgtactacctggtcagaacgcaaacgactggaactggagggacgcagactctggcattcagccaagcgggtcctagctcaatggccaaccaggctagaaattgggtgcccggaccttgctaccggcagcagcgcgtctccacgacaaccaaccagaacaacaacagcaactttgcctggacgggagctgccaagtttaagctgaacggccgagactctctaatgaatccgggcgtggcaatggcttcccacaaggatgacgacgaccgcttcttcccttcgagcggggtcctgatttttggcaagcaaggagccgggaacgatggagtggattacagccaagtgctgattacagatgaggaagaaatcaaggctaccaaccccgtagccacagaagaatatggagcagtggccatcaacaaccaggccgccaatacgcaggcgcagaccggactcgtgcacaaccagggggtgattcccggaatggtgtggcaagacagagacgtatacctgcagggtcctatttgggccaaaattcctcacacggatggacactttcacccgtctcctctcatgggcggctttggacttaagcacccgcctcctcagatcctcatcaaaaacacgcctgttcctgcgaatcctccggcagagttttcggctacaaagtttgcttcattcatcacccagtattccacaggacaagtgagcgtggagattgaatgggagctgcagaaagaaaacagcaaacgctggaatcccgaagtgcagtatacatctaactatgcaaaatctgccaacgttgatttcactgtggacaacaatggactttatactgagcctcgccccattggcacccgttacctcacccgtcccctgtaa

SEQ ID NO: 990 - DNA, 2214 bp, Artificial Sequence
  source: /note="Description of Artificial Sequence: Synthetic polynucleotide"
  modified_base (335)..(335): a, c, t, or g
atgactgacggttaccttccagattggctagaggacaacctctctgaaggcgttcgagagtggtgggcgctgcaacctggagccccgaagcccaaagccaaccagcaaaagcaggacgacggccggggtctggtgcttcctggctacaagtacctcggacccttcaacggactcgacaagggggagcccgtcaacgcggcggacgcagcggccctcgagcacgacaaggcctacgaccagcagctcaaagcgggtgacaatccgtacctgcggtataaccacgccgacgccgagtttcaggagcgtctgcaagaagatacgtcttttgggggcancctcgggcgagcagtcttccaggccaagaagcgggttctcgaacctctcggtctggttgaggaaggcgctaagacggctcctggaaagaaacgtccggtagagccatcaccccagcgttctccagactcctctacgggcatcggcaagaaaggccaacagcccgccagaaaaagactcaattttggtcagactggcgactcagagtcagttccagaccctcaacctctcggagaacctccagcagcgccctcaggtgtgggatctcttacaatggcttcaggtggtggcgcaccagtggcagacaataacgaaggtgccgatggagtgggtagttcctcgggaaattggcattgcgattcccaatggctgggggacagagtcatcaccaccagcacccgaacctgggccctgcccacctacaacaatcacctctacaagcaaatctccaacagcacatctggaggatcttcaaatgacaacgcctacttcggctacagcaccccctgggggtattttgacttcaacagattccactgccacttctcaccacgtgactggcagcgactcatcaacaacaactggggattccggcccaagagactcagcttcaagctcttcaacatccaggtcaaggaggtcacgcagaatgaaggcaccaagaccatcgccaataacctcaccagcaccatccaggtgtttacggactcggagtaccagctgccgtacgttctcggctctgcccaccagggctgcctgcctccgttcccggcggacgtgttcatgattccccagtacggctacctaacactcaacaacggtagtcaggccgtgggacgctcctccttctactgcctggaatactttccttcgcagatgctgagaaccggcaacaacttccagtttacttacaccttcgaggacgtgcctttccacagcagctacgcccacagccagagcttggaccggctgatgaatcctctgattgaccagtacctgtactacttgtctcggactcaaacaacaggaggcacggcaaatacgcagactctgggcttcagccaaggtgggcctaatacaatggccaatcaggcaaagaactggctgccaggaccctgttaccgccaacaacgcgtctcaacgacaaccgggcaaaacaacaatagcaactttgcctggactgctgggaccaaataccatctgaatggaagaaattcattggctaatcctggcatcgctatggcaacacacaaagacgacgaggagcgtttttttcccagtaacgggatcctgatttttggcaaacaaaatgctgccagagacaatgcggattacagcgatgtcatgctcaccagcgaggaagaaatcaaaaccactaaccctgtggctacagaggaatacggtatcgtggcagataacttgcagcagcaaaacacggctcctcaaattggaactgtcaacagccagggggccttacccggtatggtctggcagaaccgggacgtgtacctgcagggtcccatctgggccaagattcctcacacggacggcaacttccacccgtctccgctgatgggcggctttggcctgaaacatcctccgcctcagatcctgatcaagaacacgcctgtacctgcggatcctccgaccaccttaaaccaggccaagctgaactctttcatcacgcaatacagcaccggacaggtcagcgtggaaattgaatgggagctgcagaaggaaaacagcaagcgctggaacccagagattcagtacacttcaaactactacaaatctacaaatgtggactttgctgtcaatacagagggaacttatagtgaaccccgccccattggcaccagatttctgactcgtaatctgtaa

SEQ ID NO: 991 - DNA, 2211 bp, Artificial Sequence
  source: /note="Description of Artificial Sequence: Synthetic polynucleotide"
  modified_base (338)..(338): a, c, t, or g
atggctgccgatggttatcttccagattggctcgaggacactctctctgaaggaataagacagtggtggaagctcaaacctggcccaccaccaccaaagcccgcagagcggcataaggacgacagcaggggtcttgtgcttcctgggtacaagtacctcggccccttcaacggactcgacaagggggagcccgtcaacgcggcggacgcagcggccctcgagcacgacaaggcctacgaccagcagctcgaagcgggtgacaatccgtacctgcggtataaccacgccgacgccgagtttcaggagcgtctgcaagaagatacgtcttttgggggcancctcgggcgagcagtcttccaggccaagaagcgggttctcgaacctctcggtctggttgaggaaggcgctaagacggctcctggaaagaagagaccagtagagcagtcaccccaagaaccagactcctcctcgggcatcggcaggaaaggccaacagcccgccagaaaaagactcaattttggccagactggcgactcagagtcagttccagaccctcaacctctcggagaacctccagcagcgccctctggtgtgggacctaatacaatggcttcaggcggtggcgctccaatggcagacaataacgaaggcgccgacggagtgggtaatgcctcaggaaattggcattgcgattccacatggctgggcgacagagtcatcaccaccagcacccgcacctgggccttgcccacctacaataaccacctctacaagcaaatctccagtgcttcaacgggggccagcaacgacaaccactacttcggctacagcaccccctgggggtattttgatttcaacagattccactgccacttttcaccacgtgactggcagcgactcatcaacaacaattggggattccggcccaagagactcaacttcaaactcttcaacatccaggtcaaggaggtcacgcagaatgaaggcactaagaccatcgccaataaccttaccagcacgattcaggtatttacggactcggaataccagctgccgtacgtcctcggctccgcgcaccagggctgcctgcctccgttcccggcggacgtcttcatgattccccagtacggctaccttacactgaacaatggaagtcaagccgtaggccgttcctccttctactgcctggaatattttccatctcaaatgctgcgaactggcaacaacttccagtttacctacaccttcgaggacgtgcctttccacagcagctacgcccacagccagagcttggaccggctgatgaatcctctgattgaccagtacctgtactacttgtctcggactcagtccacaggaggaactcaaggtacccagcaattgttattttctcaagctgggcctgcaaacatgtcggctcaggctaagaactggctacctggaccttgctaccggcagcagcgagtctctacgacactgtcgcaaaacaacaacagcaactttgcttggactggtgccaccaaatatcacctgaacggaagagactctttggtaaatcccggtgtcgccatggcaacccacaaggacgacgaggaacgcttcttcccgtcgagtggagtcctgatgtttggaaaacagggtgctggaagagacaatgtggactacagcagcgttatgctaaccagcgaagaagaaattaaaaccactaaccctgtagccacagaacaatacggtgtggtggttgataacttgcagcaaaccaatacggggcctattgtgggaaatgtcaacagccaaggagccttacctggtatggtctggcagaaccgggacgtgtacctgcagggtcccatctgggccaagattcctcacacggacggcaacttccacccgtctccgctgatgggcggctttggcctgaaacatcctccgcctcagatcctcatcaaaaacacacctgtacctgcggatcctccaacggccttcaacaaggacaagctgaactctttcatcacccagtattctactggccaagtcagcgtggagatcgagtgggagctgcagaaggaaaacagcaagcgctggaacccggagatccagtacacttccaactattacaagtctaataatgttgaatttgctgttaatactgaaggtgtatatagtgaaccccgccccattggcaccagatacctgactcgtaatctgtaa

SEQ ID NO: 992 - protein, 735 aa, Artificial Sequence
  source: /note="Description of Artificial Sequence: Synthetic polypeptide"
MAADGYLPDWLEDNLSEGIREWWDLKPGAPKPKANQQKQDDGRGLVLPGYKYLGPFNGLDKGEPVNAADAAALEHDKAYDRQLDSGDNPYLKYNHADAEFQERLKEDTSFGGNLGRAVFQAKKRVLEPFGLVEEGAKTAPGKKRPVEQSPQEPDSSSGIGKTGQQPAKKRLNFGQTGDSESVPDPQPLGEPPATPAAVGPTTMASGGGAPVADNNEGADGVGSSSGNWHCDSTWLGDRVITTSTRTWALPTYNNHLYKQISSASTGASNDNHYFGYSTPWGYFDFNRFHCHFSPRDWQRLINNNWGFRPKRLNFKLFNIQVKEVTTNEGTKTIANNLTSTVQVFTDSEYQLPYVLGSAHQGCLPPFPADVFMVPQYGYLTLNNGSQALGRSSFYCLEYFPSQMLRTGNNFTFSYTFEDVPFHSSYAHSQSLDRLMNPLIDQYLYYLVRTQTTGTGGTQTLAFSQAGPSSMANQARNWVPGPCYRQQRVSTTTNQNNNSNFAWTGAAKFKLNGRDSLMNPGVAMASHKDDDDRFFPSSGVLIFGKQGAGNDGVDYSQVLITDEEEIKATNPVATEEYGAVAINNQAANTQAQTGLVHNQGVIPGMVWQNRDVYLQGPIWAKIPHTDGNFHPSPLMGGFGLKHPPPQILIKNTPVPADPPLTFNQAKLNSFITQYSTGQVSVEIEWELQKENSKRWNPEIQYTSNYYKSTNVDFAVNTEGVYSEPRPIGTRYLTRNL

SEQ ID NO: 993 - protein, 736 aa, Artificial Sequence
  source: /note="Description of Artificial Sequence: Synthetic polypeptide"
  MOD_RES (113)..(113): Any naturally occurring amino acid
MAADGYLPDWLEDTLSEGIRQWWKLKPGPPPPKPAERHKDDSRGLVLPGYKYLGPFNGLDKGEPVNAADAATLEHDKAYDQQLKAGDNPYLRYNHADAEFQERLQEDTSFGGXLGRAVFQAKKRVLEPLGLVEEAAKTAPGKKRPVEPSPQRSPDSSTGIGKKGQQPARKRLNFGQTGDSESVPDPQPLGEPPAAPSGVGPNTMAAGGGAPMADNNEGADGVGSSSGNWHCDSTWLGDRVITTSTRTWALPTYNNHLYKQISSASTGASNDNHYFGYSTPWGYFDFNRFHCHFSPRDWQRLINNNWGFRPKRLNFKLFNIQVKEVTTNDGVTTIANNLTSTVQVFSDSDYQLPYVLGSAHEGCLPPFPADVFMIPQYGYLTLNNGSQALGRSSFYCLEYFPSQMLRTGNNFQFSYTFEDVPFHSSYAHSQSLDRLMNPLIDQYLYYLVRTQTTGTGGTQTLAFSQAGPSSMANQARNWVPGPCYRQQRVSTTTNQNNNSNFAWTGAAKFKLNGRDSLMNPGVAMASHKDDDDRFFPSSGVLIFGKQGAGNDGVDYSQVLITDEEEIKATNPVATEEYGAVAINNQAANTQAQTGLVHNQGVIPGMVWQDRDVYLQGPIWAKIPHTDGHFHPSPLMGGFGLKHPPPQILIKNTPVPANPPAEFSATKFASFITQYSTGQVSVEIEWELQKENSKRWNPEVQYTSNYAKSANVDFTVDNNGLYTEPRPIGTRYLTRPL

SEQ ID NO: 994 - protein, 737 aa, Artificial Sequence
  source: /note="Description of Artificial Sequence: Synthetic polypeptide"
  MOD_RES (112)..(112): Any naturally occurring amino acid
MTDGYLPDWLEDNLSEGVREWWALQPGAPKPKANQQKQDDGRGLVLPGYKYLGPFNGLDKGEPVNAADAAALEHDKAYDQQLKAGDNPYLRYNHADAEFQERLQEDTSFGGXLGRAVFQAKKRVLEPLGLVEEGAKTAPGKKRPVEPSPQRSPDSSTGIGKKGQQPARKRLNFGQTGDSESVPDPQPLGEPPAAPSGVGSLTMASGGGAPVADNNEGADGVGSSSGNWHCDSQWLGDRVITTSTRTWALPTYNNHLYKQISNSTSGGSSNDNAYFGYSTPWGYFDFNRFHCHFSPRDWQRLINNNWGFRPKRLSFKLFNIQVKEVTQNEGTKTIANNLTSTIQVFTDSEYQLPYVLGSAHQGCLPPFPADVFMIPQYGYLTLNNGSQAVGRSSFYCLEYFPSQMLRTGNNFQFTYTFEDVPFHSSYAHSQSLDRLMNPLIDQYLYYLSRTQTTGGTANTQTLGFSQGGPNTMANQAKNWLPGPCYRQQRVSTTTGQNNNSNFAWTAGTKYHLNGRNSLANPGIAMATHKDDEERFFPSNGILIFGKQNAARDNADYSDVMLTSEEEIKTTNPVATEEYGIVADNLQQQNTAPQIGTVNSQGALPGMVWQNRDVYLQGPIWAKIPHTDGNFHPSPLMGGFGLKHPPPQILIKNTPVPADPPTTLNQAKLNSFITQYSTGQVSVEIEWELQKENSKRWNPEIQYTSNYYKSTNVDFAVNTEGTYSEPRPIGTRFLTRNL

SEQ ID NO: 995 - protein, 736 aa, Artificial Sequence
  source: /note="Description of Artificial Sequence: Synthetic polypeptide"
  MOD_RES (113)..(113): Any naturally occurring amino acid
MAADGYLPDWLEDTLSEGIRQWWKLKPGPPPPKPAERHKDDSRGLVLPGYKYLGPFNGLDKGEPVNAADAAALEHDKAYDQQLEAGDNPYLRYNHADAEFQERLQEDTSFGGXLGRAVFQAKKRVLEPLGLVEEGAKTAPGKKRPVEQSPQEPDSSSGIGRKGQQPARKRLNFGQTGDSESVPDPQPLGEPPAAPSGVGPNTMASGGGAPMADNNEGADGVGNASGNWHCDSTWLGDRVITTSTRTWALPTYNNHLYKQISSASTGASNDNHYFGYSTPWGYFDFNRFHCHFSPRDWQRLINNNWGFRPKRLNFKLFNIQVKEVTQNEGTKTIANNLTSTIQVFTDSEYQLPYVLGSAHQGCLPPFPADVFMIPQYGYLTLNNGSQAVGRSSFYCLEYFPSQMLRTGNNFQFTYTFEDVPFHSSYAHSQSLDRLMNPLIDQYLYYLSRTQSTGGTQGTQQLLFSQAGPANMSAQAKNWLPGPCYRQQRVSTTLSQNNNSNFAWTGATKYHLNGRDSLVNPGVAMATHKDDEERFFPSSGVLMFGKQGAGRDNVDYSSVMLTSEEEIKTTNPVATEQYGVVVDNLQQTNTGPIVGNVNSQGALPGMVWQNRDVYLQGPIWAKIPHTDGNFHPSPLMGGFGLKHPPPQILIKNTPVPADPPTAFNKDKLNSFITQYSTGQVSVEIEWELQKENSKRWNPEIQYTSNYYKSNNVEFAVNTEGVYSEPRPIGTRYLTRNL

SEQ ID NO: 996 - DNA, 2211 bp, Artificial Sequence
  source: /note="Description of Artificial Sequence: Synthetic polynucleotide"
  source: /note="AAV9 VP1"
atggccgccgacggctacctgcccgactggctggaggacaacctgagcgagggcatccgcgagtggtgggccctgaagcccggcgccccccagcccaaggccaaccagcagcaccaggacaacgcccgcggcctggtgctgcccggctacaagtacctgggccccggcaacggcctggacaagggcgagcccgtgaacgccgccgacgccgccgccctggagcacgacaaggcctacgaccagcagctgaaggccggcgacaacccctacctgaagtacaaccacgccgacgccgagttccaggagcgcctgaaggaggacaccagcttcggcggcaacctgggccgcgccgtgttccaggccaagaagcgcctgctggagcccctgggcctggtggaggaggccgccaagaccgcccccggcaagaagcgccccgtggagcagagcccccaggagcccgacagcagcgccggcatcggcaagagcggcgcccagcccgccaagaagcgcctgaacttcggccagaccggcgacaccgagagcgtgcccgacccccagcccatcggcgagccccccgccgcccccagcggcgtgggcagcctgaccatggccagcggcggcggcgcccccgtggccgacaacaacgagggcgccgacggcgtgggcagcagcagcggcaactggcactgcgacagccagtggctgggcgaccgcgtgatcaccaccagcacccgcacctgggccctgcccacctacaacaaccacctgtacaagcagatcagcaacagcaccagcggcggcagcagcaacgacaacgcctacttcggctacagcaccccctggggctacttcgacttcaaccgcttccactgccacttcagcccccgcgactggcagcgcctgatcaacaacaactggggcttccgccccaagcgcctgaacttcaagctgttcaacatccaggtgaaggaggtgaccgacaacaacggcgtgaagaccatcgccaacaacctgaccagcaccgtgcaggtgttcaccgacagcgactaccagctgccctacgtgctgggcagcgcccacgagggctgcctgccccccttccccgccgacgtgttcatgatcccccagtacggctacctgaccctgaacgacggcagccaggccgtgggccgcagcagcttctactgcctggagtacttccccagccagatgctgcgcaccggcaacaacttccagttcagctacgagttcgagaacgtgcccttccacagcagctacgcccacagccagagcctggaccgcctgatgaaccccctgatcgaccagtacctgtactacctgagcaagaccatcaacggcagcggccagaaccagcagaccctgaagttcagcgtggccggccccagcaacatggccgtgcagggccgcaactacatccccggccccagctaccgccagcagcgcgtgagcaccaccgtgacccagaacaacaacagcgagttcgcctggcccggcgccagcagctgggccctgaacggccgcaacagcctgatgaaccccggccccgccatggccagccacaaggagggcgaggaccgcttcttccccctgagcggcagcctgatcttcggcaagcagggcaccggccgcgacaacgtggacgccgacaaggtgatgatcaccaacgaggaggagatcaagaccaccaaccccgtggccaccgagagctacggccaggtggccaccaaccaccagagcgcccaggcccaggcccagaccggctgggtgcagaaccagggcatcctgcccggcatggtgtggcaggaccgcgacgtgtacctgcagggccccatctgggccaagatcccccacaccgacggcaacttccaccccagccccctgatgggcggcttcggcatgaagcacccccccccccagatcctgatcaagaacacccccgtgcccgccgacccccccaccgccttcaacaaggacaagctgaacagcttcatcacccagtacagcaccggccaggtgagcgtggagatcgagtgggagctgcagaaggagaacagcaagcgctggaaccccgagatccagtacaccagcaactactacaagagcaacaacgtggagttcgccgtgaacaccgagggcgtgtacagcgagccccgccccatcggcacccgctacctgacccgcaacctgtaa

SEQ ID NO: 997 - DNA, 2211 bp, Artificial Sequence
  source: /note="Description of Artificial Sequence: Synthetic polynucleotide"
atggctgccgatggttatcttccagattggctcgaggacactctctctgaaggaataagacagtggtggaagctcaaacctggcccaccaccaccaaagcccgcagagcggcataaggacgacagcaggggtcttgtgcttcctgggtacaagtacctcggacccttcaacggactcgacaagggagagccggtcaacgaggcagacgccgcggccctcgagcacgacaaggcctacgaccagcagctcaaggccggagacaacccgtacctcaagtacaaccacgccgacgccgagttccaggagcggctcaaagaagatacgtcttttgggggcaacctcggacgagcagtcttccaggccaagaagcgggttctcgaacctctcggtctggttgaggaaggcgctaagacggctcctggaaagaaacgtccggtagagcagtcgccacaagagccagactcctcctcgggcattggcaagacaggccagcagcccgctaaaaagagactcaattttggtcagactggcgactcagagtcagtccccgacccacaacctctcggagaacctccagcaacccccgctgctgtgggacctactacaatggcttcaggcggtggcgcaccaatggcggacaataacgaaggcgccgatggagtgggtagttcctcgggaaattggcattgcgattcccaatggctgggggacagagtcatcaccaccagcacccgaacatgggccttgcccacctataacaaccacctctacaagcaaatctccagtgcttcaacgggggccagcaacgacaaccactacttcggctacagcaccccctgggggtattttgacttcaacagattccactgccacttctcaccacgtgactggcagcgactcatcaacaacaactggggattccgacccaagagactcaacttcaagctctttaacattcaagtcaaggaggtcacgcagaatgaaggcaccaagaccatcgccaataacctcaccagcaccatccaggtgtttacggactcggagtaccagctgccgtacgttctcggctccgcccaccagggctgcctgcctccgttcccggcggacgtgttcatgattccccagtacggctacctaacactcaacaacggtagtcaggccgtgggacgctcctccttctactgcctggaatactttccttcgcagatgctgagaaccggcaacaacttccagtttacttacaccttcgaggacgtgcctttccacagcagctacgcccacagccagagcttggaccggctgatgaatcctctgattgaccagtacctgtactacttgtctcggactcaaacaacaggaggcacggcaaatacgcagactctgggcttcagccaaggtgggcctaatacaatggccaatcaggcaaagaactggctgccaggaccctgttaccgccaacaacgcgtctcaacgacaaccgggcaaaacaacaatagcaactttgcctggactgctgggaccaaataccatctgaatggaagaaattcattggctaatcctggcatcgctatggcaacacacaaagacgacaaggagcgtttttttcccagtaacgggatcctgatttttggcaaacaaaatgctgccagagacaatgcggattacagcgatgtcatgctcaccagcgaggaagaaatcaaaaccactaaccctgtggctacagaggaatacggtatcgtggcagataacttgcagcagcaaaacacggctcctcaaattggaactgtcaacagccagggggccttacccggtatggtctggcagaaccgggacgtgtacctgcagggtcccatctgggccaagattcctcacacggacggcaacttccacccgtctccgctgatgggcggctttggcctgaaacatcctccgcctcagatcctgatcaagaacacgcctgtacctgcggatcctccgaccaccttcaaccagtcaaagctgaactctttcatcacgcaatacagcaccggacaggtcagcgtggaaattgaatgggagctgcagaaagaaaacagcaaacgctggaacccagagattcaatacacttccaactactacaaatctacaagtgtggactttgctgttaatacagaaggcgtgtactctgaaccccaccccattggcacccgttacctcacccgtcccctgtaa

SEQ ID NO: 998 - DNA, 2211 bp, Artificial Sequence
  source: /note="Description of Artificial Sequence: Synthetic polynucleotide"
atggctgccgatggttatcttccagattggctcgaggacaacctctctgagggcattcgcgagtggtgggcgctgaaacctggagccccgaagcccaaagccaaccagcaaaagcaggacgacggccggggtctggtgcttcctggctacaagtacctcggacccttcaacggactcgacaagggggagccggtcaacgcagcagacgcggcggccctcgagcacgacaaggcctacgaccagcagctcaaggccggagacaacccgtacctcaagtacaaccacgccgacgccgagttccaggagcggctcaaagaagatacgtcttttgggggcaacctcgggcgagcagtcttccaggccaaaaagaggcttcttgaacctcttggtctggttgaggaagcggctaagacggctcctggaaagaagaggcctgtagagcagtctcctcaggaaccggactcctccgcgggtattggcaaatcgggtgcacagcccgctaaaaagagactcaattttggtcagactggcgactcagagtcagtccccgacccacaacctctcggagaacctccagcaacccccgctgctgtgggacctactacaatggcttcaggcggtggcgcaccaatggcagacaataacgaaggcgccgacggagtgggtaatgcctcaggaaattggcattgcgattccacatggctgggcgacagagtcatcaccaccagcacccgaacctgggccctgcccacctacaataaccacctctacaagcaaatctccagtgcttcaacgggggccagcaacgacaaccactacttcggctacagcaccccctgggggtattttgatttcaacagattccactgccacttttcaccacgtgactggcagcgactcatcaacaacaattggggattccggcccaagagactcaacttcaaactcttcaacatccaagtcaaggaggtcacgcagaatgaaggcaccaagaccatcgccaataacctcaccagcaccatccaggtgtttacggactcggagtaccagctgccgtacgttctcggctctgcccaccagggctgcctgcctccgttcccggcggacgtgttcatgattccccagtacggctacctaacactcaacaacggtagtcaggccgtgggacgctcctccttctactgcctggaatactttccttcgcagatgctgagaaccggcaacaacttccagtttacttacaccttcgaggacgtgcctttccacagcagctacgcccacagccagagcttggaccggctgatgaatcctctgattgaccagtacctgtactacttgtctcggactcaaacaacaggaggcacggcaaatacgcagactctgggcttcagccaaggtgggcctaatacaatggccaatcaggcaaagaactggctgccaggaccctgttaccgccaacaacgcgtctcaacgacaaccgggcaaaacaacaatagcaactttgcctggactgctgggaccaaataccatctgaatggaagaaattcattggctaatcctggcatcgctatggcaacacacaaagacgacaaggagcgtttttttcccagtaacgggatcctgatttttggcaaacaaaatgctgccagagacaatgcggattacagcgatgtcatgctcaccagcgaggaagaaatcaaagccactaaccctgtggctacagaggaatacggtatcgtggcagataacttgcagcagcaaaacacggctcctcaaattggaactgtcaacagccagggggccttacccggtatggtttggcagaaccgggacgtgtacctgcagggtcccatctgggccaagattcctcacacggacggcaacttccacccgtctccgctgatgggcggctttggcctgaaacatcctccgcctcagatcctgatcaagaacacgcctgtacctgcggatcctccgaccaccttcaaccagtcaaagctgaactctttcatcacgcaatacagcaccggacaggtcagcgtggaaattgaatgggagctgcagaaggaaaacagcaagcgctggaaccccgagatccagtacacctccaactactacaaatctacaagtgtggactttgctgttaatacagaaggcgtgtactctgaaccccaccccattggcacccgttacctcacccgtcccctgtaa

SEQ ID NO: 999 - DNA, 2214 bp, Artificial Sequence
  source: /note="Description of Artificial Sequence: Synthetic polynucleotide"
atggctgccgatggttatcttccagattggctcgaggacaacctctctgagggcattcgcgagtggtgggacttgaaacctggagccccgaagcccaaagccaaccagcaaaagcaggacgacggccggggtctggtgcttcctggctacaagtacctcggacccttcaacggactcgacaagggggagcccgtcaacgcggcggacgcagcggccctcgagcacgacaaggcctacgaccagcagctcaaagcgggtgacaatccgtacctgcggtataaccacgccgacgccgagtttcaggagcgtctgcaagaagatacgtcttttgggggcaacctcgggcgagcagtcttccaggccaagaagcgggttctcgaacctctcggtctggttgaggaaggcgctaatacggctcctggaaagaaacgtccggtagagcagtcgccacaagagccagactcctccgcgggtattggcaaatcgggtgcacagcccgctaaaaagagactcaatttcggtcagactggcgacacagagtcagtcccagaccctcaaccaatcggagaacctcccgcagccccctcaggtgtgggatctcttacaatggcttcaggtggtggcgcaccagtggcagacaataacgaaggtgccgatggagtgggtagttcctcgggaaattggcattgcgattcccaatggctgggggacagagtcatcaccaccagcacccgaacctgggccctgcccacctacaacaatcacctctacaagcaaatctccaacagcacatctggaggatcttcaaatgacaacgcctacttcggctacagcaccccctgggggtattttgacttcaacagattccactgccacttctcaccacgtgactggcagcgactcatcaacaacaactggggattccggcctaagcgactcaacttcaagctcttcaacattcaggtcaaagaggttacggacaacaatggagtcaagaccatcgccaataacctcaccagcaccatccaggtgtttacggactcggagtaccagctgccgtacgttctcggctccgcccaccagggctgcctgcctccgttcccggcggacgtgttcatgattccccagtacggctacctaacactcaacaacggtagtcaggccgtgggacgctcctccttctactgcctggaatactttccttcgcagatgctgagaaccggcaacaacttccagtttacttacaccttcgaggacgtgcctttccacagcagctacgcccacagccagagcttggaccggctgatgaatcctctgattgaccagtacctgtactacttgtctcggactcaaacaacaggaggcacggcaaatacgcagactctgggcttcagccaaggtgggcctaatacaatggccaatcaggcaaagaactggctgccaggaccctgttaccgccaacaacgcgtctcaacgacaaccgggcaaaacaacaatagcaactttgcctggactgctgggaccaaataccatctgaatggaagaaattcattggctaatcctggcatcgctatggcctcacacaaagacgacaaggagcgtttttttcccagtaacgggatcctgatttttggcaaacaaaatgctgccagagacaatgcggattacagcgatgtcatgctcaccagcgaggaagaaatcaaaaccactaaccctgtggctacagaggaatacggtatcgtggcagataacttgcagcagcaaaacacggctcctcaaattggaactgtcaacagtcaaggagccttacctggcatggtctggcagaaccgggacgtgtacctgcagggtcccatctgggccaagattcctcacacggacggcaacttccacccgtctccgctgatgggcggctttggcctgaaacatcctccgcctcagatcctgatcaagaacacgcctgtacctgcggatcctccgaccaccttcaaccagtcaaagctgaactctttcatcacgcaatacagcaccggacaggtcagcgtggaaattgaatgggagctgcagaaggaaaacagcaagcgctggaaccccgagatccagtacaccaccaactactacaaatctacaagtgtggactttgctgttaatacagaaggcgtgtactctgaaccccaccccattggcacccgttacctcacccgtcccctgtaa

SEQ ID NO: 1000 - DNA, 2211 bp, Artificial Sequence
  source: /note="Description of Artificial Sequence: Synthetic polynucleotide"
atggctgccgatggttatcttccagattggctcgaggacaacctctctgagggcattcgcgagtggtgggcgctgaaacctggagccccgaagcccaaagccaaccagcaaaagcaggacgacggccggggtctggtgcttcctggctacaagtacctcggacccttcaacggactcgacaaaggagagccggtcaacgaggcggacgcggcagccctcgaacacgacaaagcttacgaccagcagctcaaggccggtgacaatccgtacctgcggtataaccacgccgacgccgagtttcaggagcgtcttcaagaagatacgtcttttgggggcaacctcgggcgagcagtcttccaggccaagaagcgggttctcgaacctctcggtctggttgaggaaggcgctaagacggctcctggaaagaaacgtccggtagagcagtcgccacaagagccagactcctcctcgggcatcggcaagacaggccagcagcccgctaaaaagagactcaattttggtcagactggcgactcagagtcagtccccgacccacaacctctcggagaacctccagcaacccccgctgctgtgggacctactacaatggcttcaggcggtggcgcaccaatggcagacaataacgaaggcgccgacggagtgggtaatgcctcaggaaattggcattgcgattccacatggctgggcgacagagtcatcaccaccagcacccgcacctgggccttgcccacctacaataaccacctctacaagcaaatctccagtgcttcaacgggggccagcaacgacaaccactacttcggctacagcaccccctgggggtattttgactttaacagattccactgccacttttcaccacgtgactggcaaagactcatcaacaacaactggggattccggcccaagagactcaacttcaagctcttcaacatccaggtcaaggaggtcacgcagaatgaaggcaccaagaccatcgccaataaccttaccagcacgattcaggtctttacggactcggaataccagctcccgtacgtcctcggctctgcgcaccagggctgcctccctccgttcccggcggacgtgttcatgattccgcagtacggctacctaacactcaacaacggtagtcaggccgtgggacgctcctccttctactgcctggaatactttccttcgcagatgctgagaaccggcaacaacttccagtttacttacaccttcgaggacgtgcctttccacagcagctacgcccacagccagagcttggaccggctgatgaatcctctgattgaccagtacctgtactacttgtctcggactcaaacaacaggaggcacggcaaatacgcagactctgggcttcagccaaggtgggcctaatacaatggccaatcaggcaaagaactggctgccaggaccctgttaccgccaacaacgcgtctcaacgacaaccgggcaaaacaacaatagcaactttgcctggactgctgggaccaaataccatctgaatggaagaaattcattggctaatcctggcatcgctatggcaacacacaaagacgacaaggagcgtttttttcccagtaacgggatcctgatttttggcaaacaaaatgctgccagagacaatgcggattacagcgatgtcatgctcaccagcgaggaagaaatcaaaaccactaaccctgtggctacagaggaatacggtatcgtggcagataacttgcagcagcaaaacacggctcctcaaattggaactgtcaacagccagggggccttacccggtatggtctggcagaaccgggacgtgtacctgcagggtcccatctgggccaagattcctcacacggacggcaacttccacccgtctccgctgatgggcggctttggcctgaaacatcctccgcctcagatcctgatcaagaacacgcctgtacctgcggatcctccgaccaccttcaaccagtcaaagctgaactctttcatcacgcaatacagcaccggacaggtcagcgtggaaattgaatgggagctgcagaaggaaaacagcaagcgctggaaccccgagatccagtacacctccaactactacaaatctacaagtgtggactttgctgttaatacagaaggcgtgtactctgaaccccaccccattggcacccgttacctcacccgtcccctgtaa

SEQ ID NO: 1001 - DNA, 2211 bp, Artificial Sequence
  source: /note="Description of Artificial Sequence: Synthetic polynucleotide"
atggctgccgatggttatcttccagattggctcgaggacaacctctctgagggcattcgcgagtggtgggcgctgaaacctggagccccgaagcccaaagccaaccagcaaaagcaggacgacggccggggtctggtgcttcctggctacaagtacctcggacccttcaacggactcgacaaaggagagccggtcaacgaggcggacgcggcagccctcgaacacgacaaagcttacgaccagcagctcaaagcgggtgacaatccgtacctgcggtataaccacgccgacgccgagtttcaggagcgtctgcaagaagatacgtcttttgggggcaacctcgggcgagcagtcttccaggccaagaagagggttctcgaaccttttggtctggttgaggaaggtgctaagacggctcctggaaagaaacgtccggtagagcagtcgccacaagagccagactcctcctcgggcattggcaagacaggccagcagcccgctaaaaagagactcaattttggtcagactggcgactcagagtcagtccccgacccacaacctctcggagaacctccagcaacccccgctgctgtgggacctactacaatggcttcaggcggtggcgcaccaatggcagacaataacgaaggcgccgacggagtgggtaatgcctcaggaaattggcattgcgattcccaatggctgggcgacagagtcatcaccaccagcaccagaacctgggccttgcccacctataacaaccacctctacaagcaaatctccagtgcttcaacgggggccagcaacgacaaccactacttcggctacagcaccccctgggggtattttgatttcaacagattccactgccacttctcaccacgtgactggcagcgactcatcaacaacaactggggattccggcctaagcgactcaacttcaagctcttcaacattcaggtcaaagaggttacggacaacaatggagtcaagaccatcgccaataaccttaccagcacggttcaagtcttctcggactcggagtaccagttgccgtacgtcctcggctctgcgcaccagggctgcctccctccgttcccggcggacgtgttcatgattccccagtacggctacctaacactcaacaacggtagtcaggccgtgggacgctcctccttctactgcctggaatactttccttcgcagatgctgagaaccggcaacaacttccagtttacttacaccttcgaggacgtgcctttccacagcagctacgcgcacagccagagcttggaccggctgatgaatcctctgattgaccagtacctgtactacttgtctcggactcaaacaacaggaggcacggcaaatacgcagactctgggcttcagccaaggtgggcctaatacaatggccaatcaggcaaagaactggctgccaggaccctgttaccgccaacaacgcgtctcaacgacaaccgggcaaaacaacaatagcaactttgcctggactgctgggaccaaataccatctgaatggaagaaattcattggctaatcctggcatcgctatggcaacacacaaagacgacaaggagcgtttttttcccagtaacgggatcctgatttttggcaaacaaaatgctgccagagacaatgcggattacagcgatgtcatgctcaccagcgaggaagaaatcaaaaccactaaccctgtggctacagaggaatacggtatcgtggcagataacttgcagcagcaaaacacggctcctcaaattggaactgtcaacagccagggggccttacccggtatggtctggcagaaccgggacgtgtacctgcagggtcccatctgggccaagattcctcacacggacggcaacttccacccgtctccgctgatgggcggctttggcctgaaacatcctccgcctcagatcctgatcaagaacacgcctgtacctgcggatcctccgaccaccttcaaccagtcaaagctgaactctttcatcacgcaatacagcaccggacaggtcagcgtggaaattgaatgggagctgcagaaggaaaacagcaagcgctggaaccccgagatccagtacacctccaactactacaaatctacaagtgtggactttgctgttaatacagaaggcgtgtactctgaaccccaccccattggcacccgttacctcacccgtcccctgtaa

SEQ ID NO: 1002 - DNA, 2244 bp, Artificial Sequence
  source: /note="Description of Artificial Sequence: Synthetic polynucleotide"
  modified_base (2241)..(2241): a, c, t, or g
atggctgccgatggttatcttccagattggctcgaggacactctctctgaaggaataagacagtggtggaagctcaaacctggcccaccaccaccaaagcccgcagagcggcataaggacgacagcaggggtcttgtgcttcctgggtacaagtacctcggacccttcaacggactcgacaagggagagccggtcaacgaggcagacgccgcggccctcgagcacgacaaagcctacgaccggcagctcgacagcggagacaacccgtacctcaagtacaaccacgccgacgcggagtttcaggagcgccttaaagaagatacgtcttttgggggcaacctcgggcgagcagtcttccaggccaagaagagggttctcgaaccttttggtctggttgaggaaggtgctaagacggctcctggaaagaaacgtccggtagagcagtcgccacaagagccagactcctcctcgggcattggcaagacaggccagcagcccgctaaaaagagactcaattttggtcagactggcgactcagagtcagtccccgacccacaacctctcggagaacctccagcaacccccgctgctgtgggacctactacaatggcttcaggcggtggcgcaccaatggcagacaataacgaaggcgccgacggagtgggtaatgcctcaggaaattggcattgcgattccacatggctgggcgacagagtcatcaccaccagcacccgaacatgggccttgcccacctataacaaccacctctacaagcaaatctccagtgcttcaacgggggccagcaacgacaaccactacttcggctacagcaccccctgggggtattttgacttcaacagattccactgccacttctcaccacgtgactggcagcgactcatcaacaacaactggggattccggcctaagcgactcaacttcaagctcttcaacattcaggtcaaagaggttacggacaacaatggagtcaagaccatcgccaataaccttaccagcacggtccaggtcttcacggactcagactatcagctcccgtacgtgctcgggtcggctcacgagggctgcctcccgccgttcccagcggacgttttcatgattcctcagtacggctacctaacactcaacaacggtagtcaggccgtgggacgctcctccttctactgcctggaatactttccttcgcagatgctgagaaccggcaacaacttccagtttacttacaccttcgaggacgtgcctttccacagcagctacgcgcacagccagagcttggaccggctgatgaatcctctgattgaccagtacctgtactacttgtctcggactcaaacaacaggaggcacggcaaatacgcagactctgggcttcagccaaggtgggcctaatacaatggccaatcaggcaaagaactggctgccaggaccctgttaccgccaacaacgcgtctcaacgacaaccgggcaaaacaacaatagcaactttgcctggactgctgggaccaaataccatctgaatggaagaaattcattggctaatcctggcatcgctatggcaacacacaaagacgacaaggagcgtttttttcccagtaacgggatcctgatttttggcaaacaaaatgctgccagagacaatgcggattacagcgatgtcatgctcaccagcgaggaagaaatcaaaaccactaaccctgtggctacagaggaatacggtatcgtggcagataacttgcagcagcaaaacacggctcctcaaattggaactgtcaacagccagggggccttacccggtatggtctggcagaaccgggacgtgtacctgcagggtcccatctgggccaagattcctcacacggacggcaacttccacccgtctccgctgatgggcggctttggcctgaaacatcctccgcctcagatcctgatcaagaacacgcctgtacctgcggatcctccgaccaccttcaaccagtcaaagctgaactctttcatcacgcaatacagcaccggacaggtcagcgtggaaattgaatgggagctgcagaaggaaaacagcaagcgctggaaccccgagatccagtacacctccaactactacaaatctacaagtgtggactttgctgttaatacagaaggcgtgtactctgaaccccaccccattggcaccagatacctgactcgtaatctgtaattgcttgttaatcaataaaccgtttaattnttt

SEQ ID NO: 1003 - DNA, 2217 bp, Artificial Sequence
  source: /note="Description of Artificial Sequence: Synthetic polynucleotide"
atggctgccgatggttatcttccagattggctcgaggacaacctctctgagggcattcgcgagtggtgggacttgaaacctggagccccgaaacccaaagccaaccagcaaaagcaggacgacggccggggtctggtgcttcctggctacaagtacctcggacccttcaacggactcgacaagggggagcccgtcaacgcggcggacgcagcggccctcgagcacgacaaggcctacgaccagcagctccaagcgggtgacaatccgtacctgcggtataaccacgccgacgccgagtttcaggagcgtctgcaagaagatacgtcttttgggggcaacctcggacgagcagtcttccaggcgaaaaagagggttctcgaacctctcggtctggttgaggaaggcgctaagacggctcctggaaagaagagaccggtagagccatcaccccagcgttctccagactcctctacgggcatcggcaagaaaggccaacagcccgccagaaaaagactcaattttggtcagactggcgactcagagtcagttccagaccctcaacctctcggagaacctccagcagcgccctctggtgtgggacctaatacaatggctgcaggcggtggcgcaccaatggcagacaataacgaaggcgccgacggagtgggtagttcctcgggaaattggcattgcgattcccaatggctgggggacagagtcatcaccaccagcacccgaacctgggccctgcccacctacaacaatcacctctacaagcaaatctccaacagcacatctggaggatcttcaaatgacaacgcctacttcggctacagcaccccctgggggtattttgacttcaaccgcttccactgccacttctcaccacgtgactggcagcgactcatcaacaacaactggggattccggcccaagagactcagcttcaaactcttcaacatccaggtcaaggaggtcacgcagaatgaaggcaccaagaccatcgccaataacctcaccagcaccatccaggtgtttacggactcggagtaccagctgccgtacgttctcggctctgcccaccagggctgcctgcctccgttcccggcggacgtgttcatgattcctcagtacggctacctaacgctcaacaatggcagccaggcagtgggacggtcatccttttactgcctggaatatttcccatcgcagatgctgagaacgggcaacaactttaccttcagctacacctttgaggacgttcctttccacagcagctacgctcacagccagagtctggaccgtctcatgaatcctctgattgaccagtacctgtactacttgtctcggactcaaacaacaggaggcacggcaaatacgcagactctgggcttcagccaaggtgggcctaatacaatggccaatcaggcaaagaactggctgccaggaccctgttaccgccaacaacgcgtctcaacgacaaccgggcaaaacaacaatagcaactttgcctggactgctgggaccaaataccatctgaatggaagaaattcattggctaatcctggcatcgctatggcaacacacaaagacgacaaggagcgtttttttcccagtaacgggatcctgatttttggcaaacaaaatgctgccagagacaatgcggattacagcgatgtcatgctcaccagcgaggaagaaatcaaaaccactaaccctgtggctacagaggaatacggtatcgtggcagataacttgcagcagcaaaacacggctcctcaaattggaactgtcaacagccagggggccttacccggtatggtctggcagaaccgggacgtgtacctgcagggtcccatctgggccaagattcctcacacggacggcaacttccacccgtctccgctgatgggcggctttggacttaagcacccgcctcctcagatcctcatcaaaaacacgcctgttcctgcggatcctccgaccaccttcaaccagtcaaagctgaactctttcatcacgcaatacagcaccggacaggtcagcgtggaaattgaatgggagctgcagaaggaaaacagcaagcgctggaaccccgagatccagtacacctccaactactacaaatctacaagtgtggactttgctgttaatacagaaggcgtgtactctgaaccccaccccattggcacccgttacctcacccgtcccctgtaa

SEQ ID NO: 1004 - DNA, 2214 bp, Artificial Sequence
  source: /note="Description of Artificial Sequence: Synthetic polynucleotide"
atggctgccgatggttatcttccagattggctcgaggacaacctctctgagggcattcgcgagtggtgggacttgaaacctggagccccgaagcccaaagccaaccagcaaaagcaggacgacggccggggtctggtgcttcctggctacaagtacctcggacccttcaacggactcgacaagggggagcccgtcaacgcggcggatgcagcggccctcgagcacgacaaagcctacgaccagcagctcaaagcgggtgacaatccgtacctgcggtataaccacgccgacgccgagtttcaggagcgtctgcaagaagatacgtcttttgggggcaacctcgggcgagcagtcttccaggccaagaagagggttctcgaaccttttggtctggttgaggaaggtgctaagacggctcctggaaagaaacgtccggtagagcagtcgccacaagagccagactcctcctcgggcattggcaagacaggccagcagcccgctaaaaagagactcaattttggtcagactggcgactcagagtcagtccccgacccacaacctctcggagaacctccagcaacccccgctgctgtgggacctactacaatggcttcaggcggtggcgcacccatgcaagacaataacgaaggcgccgacggagtgggtagttcctcgggaaattggcattgcgattccacatggctgggcgacagagtcatcaccaccagcacccgaacctgggccctgcccacctacaacaaccacctctacaagcaaatctccaacgggacatcgggaggagccaccaacgacaacacctacttcggctacagcaccccctgggggtattttgactttaacagattccactgccacttttcaccacgtgactggcagcgactcatcaacaacaactggggattccggcccaagagactcaacttcaagctcttcaacatccaggtcaaggaggtcacgcagaatgaaggcaccaagaccatcgccaataaccttaccagcacgattcaggtctttacggattcggaataccagctcccgtacgtcctcggctctgcgcaccagggctgcctccctccgttcccggcggacgtgttcatgattccgcagtacggctacctaacgctcaacaatggtagccaggcagtgggacggtcatccttttactgcctggaatatttcccatcgcagatgctgagaacgggcaacaactttaccttcagctacacctttgaggacgttcctttccacagcagctacgctcacagccagagtctggaccgtctcatgaatcctctgattgaccagtacctgtactacttgtctcggactcaaacaacaggaggcacggcaaatacgcagactctgggcttcagccaaggtgggcctaatacaatggccaatcaggcaaagaactggctgccaggaccctgttaccgccaacaacgcgtctcaacgacaaccgggcaaaacaacaatagcaactttgcctggactgctgggaccaaataccatctgaatggaagaaattcattggctaatcctggcatcgctatggcaacacacaaagacgacaaggagcgtttttttcccagtaacgggatcctgatttttggcaaacaaaatgctgccagagacaatgcggattacagcgatgtcatgctcaccagcgaggaagaaatcaaaaccactaaccctgtggctacagaggaatacggtatcgtggcagataacttgcagcagcaaaacacggctcctcaaattggaactgtcaacagccagggggccttacccggtatggtctggcagaaccgggacgtgtacctgcagggtcccatctgggccaagattcctcacacggacggcaacttccacccgtctccgctgatgggcggctttggcctgaaacatcctccgcctcagatcctgatcaagaacacgcctgtacctgcggatcctccgaccaccttcaaccagtcaaagctgaactctttcatcacgcaatacagcaccggacaggtcagcgtggaaattgaatgggagctgcagaaggaaaacagcaagcgctggaaccccgagatccagtacacctccaactactacaaatctacaagtgtggactttgctgttaatacagaaggcgtgtactctgaaccccaccccattggcacccgttacctcacccgtcccctgtaa

SEQ ID NO: 1005 - DNA, 2211 bp, Artificial Sequence
  source: /note="Description of Artificial Sequence: Synthetic polynucleotide"
atggctgccgatggttatcttccagattggctcgaggacaacctctctgagggcattcgcgagtggtgggcgctgaaacctggagccccgaagcccaaagccaaccagcaaaagcaggacgacggccggggtctggtgcttcctggctacaagtacctcggacccttcaacggactcgacaagggggagcccgtcaacgcggcggacgcagcggccctcgagcacgacaaggcctacgaccagcagctcaaagcgggtgacaatccgtacctgcggtataaccacgccgacgccgagtttcaggagcgtctgcaagaagatacgtcttttgggggcaacctcgggcgagcagtcttccaggccaagaagcgggttctcgaacctctcggtctggttgaggaaggcgctaagacggctcctggaaagaaacgtccggtagagcagtcgccacaagagccagactcctcctcgggcatcggcaagacaggccagcagcccgctaaaaagagactcaattttggtcagactggcgactcagagtcagtccccgacccacaacctctcggagaacctccagcaacccccgctgctgtgggacctactacaatggcttcaggcggtggcgcaccaatggcagacaataacgaaggcgccgacggagtgggtagttcctcgggaaattggcattgcgattccacatggctgggcgacagagtcatcaccaccagcacccgcacctgggccttgcccacctacaataaccacctctacaagcaaatctccagtgcttcaacgggggccagcaacgacaaccactacttcggctacagcaccccctgggggtattttgacttcaacagattccactgccacttctcaccacgtgactggcagcgactcatcaacaacaactggggattccggcctaagcgactcaacttcaagctcttcaacattcaggtcaaagaggttacggacaacaatggagtcaagaccatcgccaataaccttaccagcacggtccaggtcttcacggactcagactatcagctcccgtacgtgctcgggtcggctcacgagggctgcctcccgccgttcccagcggacgttttcatgattcctcagtacgggtatctgacgctcaacaatggcagccaggcagtgggacggtcatccttttactgcctggaatatttcccatcgcagatgctgagaacgggcaataactttaccttcagctacaccttcgaggacgtgcctttccacagcagctacgcgcacagccagagcctggaccggctgatgaatcctctgattgaccagtacctgtactacttgtctcggactcaaacaacaggaggcacggcaaatacgcagactctgggcttcagccaaggtgggcctaatacaatggccaatcaggcaaagaactggctgccaggaccctgttaccgccaacaacgcgtctcaacgacaaccgggcaaaacaacaatagcaactttgcctggactgctgggaccaaataccatctgaatggaagaaattcattggctaatcctggcatcgctatggcaacacacaaagacgacaaggagcgtttttttcccagtaacgggatcctgatttttggcaaacaaaatgctgccagagacaatgcggattacagcgatgtcatgctcaccagcgaggaagaaatcaaaaccactaaccctgtggctacagaggaatacggtatcgtggcagataacttgcagcagcaaaacacggctcctcaaattggaactgtcaacagccagggggccttacccggtatggtctggcagaaccgggacgtgtacctgcagggtcccatctgggccaagattcctcacacggacggcaacttccacccgtctccgctgatgggcggctttggcctgaaacatcctccgcctcagatcctgatcaagaacacgcctgtacctgcggatcctccgaccaccttcaaccagtcaaagctgaactctttcatcacgcaatacagcaccggacaggtcagcgtggaaattgaatgggagctgcagaaggaaaacagcaagcgctggaaccccgagatccagtacacctccaactactacaaatctacaagtgtggactttgctgttaatacagaaggcgtgtactctgaaccccaccccattggcacccgttacctcacccgtcccctgtaa

SEQ ID NO: 1006 - DNA, 2214 bp, Artificial Sequence
  source: /note="Description of Artificial Sequence: Synthetic polynucleotide"
atggctgccgatggttatcttccagattggctcgaggacaacctctctgagggcattcgcgagtggtgggacttgaaacctggagccccgaaacccaaagccaaccagcaaaagcaggacgacggccggggtctggtgcttcctggctacaagtacctcggacccttcaacggactcgacaagggggagcccgtcaacgcggcggatgcagcggccctcgagcacgacaaggcctacgaccagcagctcaaagcgggtgacaatccgtacctgcggtataaccacgccgacgccgagtttcaggagcgtctgcaagaagatacgtcttttgggggcaacctcgggcgagcagtcttccaggccaagaagcgggttctcgaacctctcggtctggttgaggaaggcgctaagacggctcctggaaagaagagaccggtagagccatcaccccagcgttctccagactcctctacgggcatcggcaagaaaggccaacagcccgccagaaaaagactcaattttggtcagactggcgactcagagtcagtccccgacccacaacctctcggagaacctccagcaacccccgctgctgtgggacctactacaatggcttcaggcggtggcgcaccaatggcagacaataacgaaggcgccgacggagtgggtaatgcctcaggaaattggcattgcgattccacatggctgggcgacagagtcatcaccaccagcacccgaacatgggccttgcccacctataacaaccacctctacaagcaaatctccagtgcttcaacgggggccagcaacgacaaccactacttcggctacagcaccccctgggggtattttgatttcaacagattccactgccatttctcaccacgtgactggcagcgactcatcaacaacaatttgggatcccggcccaagagactcaacttcaagctcttcatcatccaagtcaaggaggtcacgacgaatgatggcgtcacgaccatcgctaataaccttaccagcacggttcaagtcttctcggactcggagtaccagttgccgtacgtcctcggctctgcgcaccagggctgcctccctccgttcccggcggacgtgttcatgattccgcagtacggctacctaacgctcaacaatggcagccaggcagtgggacggtcatccttttactgcctggaatatttcccatcgcagatgctgagaacgggcaataactttaccttcagctacaccttcgaggacgtgcctttccacagcagctacgcgcacagccagagcctggaccggctgatgaatcctctcatcgaccagtacctgtattacctgaacagaactcagaatcagtccggaagtgcccaaaacaaggacttgctgtttagccgggggtctccagctggcatgtctgttcagcccaaaaactggctacctggaccctgttaccggcagcagcgcgtttctaaaacaaaaacagacaacaacaacagcaactttacctggactggtgcttcaaaatataaccttaatgggcgtgaatctataatcaaccctggcactgctatggcctcacacaaagacgacaaagacaagttctttcccatgagcggtgtcatgatttttggaaaggagagcgccggagcttcaaacactgcattggacaatgtcatgatcacagacgaagaggaaatcaaagccactaaccccgtggccaccgaaagatttgggactgtggcagtcaatctccagagcagcagcacagaccctgcgaccggagatgtgcatgttatgggagccttacctggaatggtgtggcaagacagagacgtatacctgcagggtcctatttgggccaaaattcctcacacggatggacactttcacccgtctcctctcatgggcggctttggacttaagcacccgcctcctcagatcctcatcaaaaacacgcctgttcctgcgaatcctccggcagagttttcggctacaaagtttgcttcattcatcacccagtattccacaggacaagtgagcgtggagattgaatgggagctgcagaaagaaaacagcaaacgctggaatcccgaagtgcagtatacatctaactatgcaaaatctgccaacgttgatttcactgtggacaacaatggactttatactgagcctcgccccattggcacccgttacctcacccgtcccctgtaa

SEQ ID NO: 1007 - DNA, 2211 bp, Artificial Sequence
  source: /note="Description of Artificial Sequence: Synthetic polynucleotide"
atggctgccgatggttatcttccagattggctcgaggacaacctctctgagggcattcgcgagtggtgggcgctgaaacctggagccccgaaacccaaagccaaccagcaaaagcaggacgacggccggggtctggtgcttcctggctacaagtacctcggacccttcaacggactcgacaagggggagcccgtcaacgcggcggacgcagcggccctcgagcacgacaaggcctacgaccagcagctcaaggcgggtgacaatccgtacctgcggtataaccacgccgacgccgagtttcaggagcgtctgcaagaagatacgtcttttgggggcaacctcgggcgagcagtcttccaggccaaaaagaggcttcttgaacctcttggtctggttgaggaagcggctaagacggctcctggaaagaaacgtccggtagagcagtcgccacaagagccagactcctcctcgggcattggcaagacaggccagcagcccgctaaaaagagactcaactttgggcagactggcgactcagagtcagtgcccgaccctcaaccaatcggagaacctccagcaacccccgctgctgtgggacctactacaatggcttcaggcggtggcgcaccaatggcggacaataacgaaggcgccgatggagtgggtaattcctcgggaaattggcattgcgattccacatggctgggcgacagagtcatcaccaccagcacccgaacctgggccctgcccacctacaacaatcacctctacaagcaaatctccagtgcttcaacgggggccagcaacgacaaccactacttcggctacagcaccccctgggggtattttgatttcaacagattccactgccacttttcaccacgtgactggcagcgactcatcaacaacaactggggattccggcccaagagactcaacttcaagctcttcaacatccaggtcaaggaggtcacgcagaatgaaggcaccaagaccatcgccaataacctcaccagcaccatccaggtgtttacggactcggagtaccagctgccgtacgttctcggctccgcccaccagggctgcctgcctccgttcccggcggacgtgttcatgattccgcagtacggctacctaacgctcaacaatggcagccaggcagtgggacggtcatccttttactgcctggaatatttcccatcgcagatgctgagaacgggcaacaactttaccttcagctacacctttgaggacgttcctttccacagcagctacgctcacagccagagtctggaccgtctcatgaatcctctgattgaccagtacctgtactacttgtctcggactcaaacaacaggaggcacggcaaatacgcagactctgggcttcagccaaggtgggcctaatacaatggccaatcaggcaaagaactggctgccaggaccctgttaccgccaacaacgcgtctcaacgacaaccgggcaaaacaacaatagcaactttgcctggactgctgggaccaaataccatctgaatggaagaaattcattggctaatcctggcatcgctatggcaacacacaaagacgacaaggagcgtttttttcccagtaacgggatcctgatttttggcaaacaaaatgctgccagagacaatgcggattacagcgatgtcatgctcaccagcgaggaagaaatcaaaaccactaaccctgtggctacagaggaatacggtatcgtggcagataacttgcagcagcaaaacacggctcctcaaattggaactgtcaacagccagggggccttacccggtatggtctggcagaaccgggacgtgtacctgcagggtcccatctgggccaagattcctcacacggacggcaacttccacccgtctccgctgatgggcggctttggcctgaaacatcctccgcctcagatcctgatcaagaacacgcctgtacctgcggatcctccgaccaccttcaaccagtcaaagctgaactctttcatcacgcaatacagcaccggacaggtcagcgtggaaattgaatgggagctgcagaaggaaaacagcaagcgctggaaccccgagatccagtacacctccaactactacaaatctacaagtgtggactttgctgttaatacagaaggcgtgtactctgatccccaccccattggcacccgttacctcacccgtcccctgtaa

SEQ ID NO: 1008 - DNA, 2211 bp, Artificial Sequence
  source: /note="Description of Artificial Sequence: Synthetic polynucleotide"
atggctgccgatggttatcttccagattggctcgaggacaacctctctgagggcattcgcgagtggtgggcgctgaaacctggagccccgaagcccaaagccaaccagcaagagcaggacgacggccggggtctggtgcttcctggctacaagtacctcggacccttcaacggactcgacaagggagagcccgtcaacgcggcggatgcagcggccctcgagcacgacaaagcctacgaccagcagctcaaagcgggtgacaatccgtacctgcggtataaccacgccgacgccgagtttcaggagcgtctgcaagaagatacgtcttttgggggcaacctcgggcgagcagtcttccaggccaagaagagggttctcgaaccttttggtctggttgaggaaggtgctaagacggctcctggaaagaaacgtccggtagagcagtcgccacaagagccagactcctcctcgggcattggcaagacaggccagcagcccgctaaaaagagactcaattttggtcagactggcgactcagagtcagttccagaccctcaacctctcggagaacctccagcagcgccctctggtgtgggacctaatacaatggctgcaggcggtggcgcaccaatggcagacaataacgaaggcgccgacggagtgggtagttcctcgggaaattggcattgcgattccacatggctgggcgacagagtcatcaccaccagcacccgaacctgggccctgcccacctacaacaaccacctctacaagcaaatctccagtgcttcaacgggggccagcaacgacaaccactacttcggctacagcaccccctgggggtattttgactttaacagattccactgccacttttcaccacgtgactggcagcgactcatcaacaacaactggggattccggcccaagagactcaacttcaagctcttcaacatccaggtcaaggaggtcacgcagaatgaaggcaccaagaccatcgccaataaccttaccagcacgattcaggtctttacggattcggaataccagctcccgtacgtcctcggctctgcgcaccagggctgcctccctccgttcccggcggacgtgttcatgattccgcagtacggctacctaacgctcaacaatggtagccaggcagtgggacggtcatcctttttctgcctggaatatttcccatcgcagatgctgagaacgggcaacaactttaccttcagctacacctttgaggacgttcctttccacagcagctacgctcacagccagagtctggaccgtctcatgaatcctctgattgaccagtacctgtactacttgtctcggactcaaacaacaggaggcacggcaaatacgcagactctgggcttcagccaaggtgggcctaatacaatggccaatcaggcaaagaactggctgccaggaccctgttaccgccaacaacgcgtctcaacgacaaccgggcaaaacaacaatagcaactttgcctggactgctgggaccaaataccatctgaatggaagaaattcattggctaatcctggcatcgctatggcaacacacaaagacgacaaggagcgtttttttcccagtaacgggatcctgatttttggcaaacaaaatgctgccagagacaatgcggattacagcgatgtcatgctcaccagcgaggaagaaatcaaaaccactaaccctgtggctacagaggaatacggtatcgtggcagataacttgcagcagcaaaacacggctcctcaaattggaactgtcaacagccagggggccttacccggtatggtctggcagaaccgagacgtgtacctgcagggtcccatctgggccaagattcctcacacggacggcaacttccacccgtctccgctgatgggcggctttggcctgaaacatcctccgcctcagatcctgatcaagaacacgcctgtacctgcggatcctccgaccaccttcaaccagtcaaagctgaactctttcatcacgcaatacagcaccggacaggtcagcgtggaaattgaatgggagctgcagaaggaaaacagcaagcgctggaaccccgagatccagtacacctccaactactacaaatctacaagtgtggactttgctgttaatacagaaggcgtgtactctgaaccccaccccattggcacccgttacctcacccgtcccctgtaa

SEQ ID NO: 1009 - DNA, 2211 bp, Artificial Sequence
  source: /note="Description of Artificial Sequence: Synthetic polynucleotide"
atggctgccgatggttatcttccagattggctcgaggacaacctctctgagggcattcgcgagtggtgggacttgaaacctggagccccgaagcccaaagccaaccagcaaaagcaggacgacggccggggtctggtgcttcctggctacaagtacctcggacccttcaacggactcgacaagggggagcccgtcaacgcggcggacgcagcggccctcgagcacgacaaggcctacgaccagcagctcaaagcgggtgacaatccgtacctgcggtataaccacgccgacgccgagtttcaggagcgtctgcaagaagatacgtcttttgggggcaacctcgggcgagcagtcttccaggccaagaagcgggttctcgaacctctcggtctggttgaggaaggcgctaagacggctcctggaaagaaacgtccggtagagcagtcaccacaagagccagactcctcctcgggcatcggcaagacaggccagcagcccgctaaaaagagactcaattttggtcagactggcgactcagagtcagtccccgacccacaacctctcggagaacctccagcaacccccgctgctgtgggacctactacaatggcttcaggcggtggcgcaccaatggcggacaataacgaaggcgccgacggagtgggtaatgcctcaggaaattggcattgcgattccacatggctgggcgacagagtcatcaccaccagcacccgaacatgggccttgcccacctataacaaccacctctacaagcaaatctccagtgcttcaacgggggccagcaacgacaaccactacttcggctacagcaccccctgggggtattttgatttcaacagattccactgccatttctcaccacgtgactggcagcgactcatcaacaacaattggggattccggcccaagagactcaacttcaagctcttcaacatccaagtcaaggaggtcacgacgaatgatggcgtcacgaccatcgctaataaccttaccagcacggttcaagtcttctcggactcggagtaccagttgccgtacgtcctcggctctgcgcaccagggctgcctccctccgttcccggcggacgtgttcatgattccgcagtacggctacctaacgctcaacaatggcagccaggcagtgggacggtcatccttttactgcctggaatatttcccatcgcagatgctgagaacgggcaataactttaccttcagctacaccttcgaggacgtgcctttccacagcagctacgcgcacagccagagcctggaccggctgatgaatcctctcatcgaccagtacctgtattacctgaacagaactcagaatcagtccggaagtgcccaaaacaaggacttgctgtttagccgggggtctccagctggcatgtctgttcagcccaaaaactggctacctggaccctgttaccggcagcagcgcgtttctaaaacaaaaacagacaacaacaacagcaactttacctggacaggtgcttcaaaatataaccttaatgggcgtgaatctataatcaaccctggcactgctatggcctcacacaaagacgacaaagacaagttctttcccatgagcggtgtcatgatttttggaaaggagagcgccggagcttcaaacactgcattggacaatgtcatgatcacagacgaagaggaaatcaaagccactaaccccgtggccaccgaaagatttgggactgtggcagtcaatctccagaacagcagcacagaccctgcgaccggagatgtgcatgttatgggagccttacctggaatggtgtggcaagacagagacgtatacctgcagggtcctatttgggccaaaattcctcacacggatggacactttcacccgtctcctctcatgggcggctttggacttaagcacccgcctcctcagatcctcatcaaaaacacgcctgttcctgcgaatcctccggcagagttttcggctacaaagtttgcttcattcatcacccagtattccacaggacaagtgagcgtggagattgaatgggagctgcagaaagaaaacagcaaacgctggaatcccgaagtgcagtatacatctaactatgcaaaatctgccaacgttgatttcactgtagacaacaatggactttatactgtgcctcgccccattggcacccgttacctcacccgtcccctgtaa

SEQ ID NO: 1010 - DNA, 2211 bp, Artificial Sequence
  source: /note="Description of Artificial Sequence: Synthetic polynucleotide"
atggctgccgatggttatcttccagattggctcgaggacaacctctctgagggcattcgcgagtggtgggcgctgaaacctggagccccgaagcccaaagccaaccagcaaaagcaggacgacggccggggtctggtgcttcctggctacaagtacctcggacccttcaacggactcgacaaaggagagccggtcaacgcggcggacgcggcggccctcgaacacgacaaggcttacgaccagcagctcaaggcgggtgacaacccctacctgcggtataaccacgccgacgccgagttccaggagcggctgcaagaagatacgtcttttgggggcaacctcgggcgagcagtcttccaggccaaaaagaggcttcttgaacctcttggtctggttgaggaaggcgctaagacggctcctggaaagaagaggcctgtagagcagtctcctcaagaaccggactcctcctcgggtattggcaaaacaggtgagcagcccgctaaaaagagactcaattttggtcagactggcgactcagagtcagtccccgacccacaacctctcggagaacctccagcaacccccgctgctgtgggacctactacaatggcttcaggcggtggcgcaccaatggcagacaataacgaaggcgccgacggagtgggtagtgcctcaggaaattggcattgcgattccacatggctgggcgacagagtcatcaccaccagcacccgaacctgggccctgcccacctataacaaccatctctacaagcaaatctccagtgcttcaacgggggccagcaacgacaaccactacttcggctacagcaccccctgggggtattttgacttcaacagattccactgccacttctcaccacgtgactggcagcgactcatcaacaacaactggggattccggcctaagcgactcaacttcaagctcttcaacattcaggtcaaagaggttacggacaacaatggagtcaagaccatcgccaataacctcaccagcaccatccaggtgttcacggactcagagtatcagctgccgtacgtgctcgggtcggctcaccagggctgcctccctccgttcccagcggacgtgttcatgattcctcagtacgggtatctgacactcaacaacggcagtcaggcagtgggacggtcatccttctactgcctggaatattttccatcgcagatgctgagaaccggcaacaactttccgttcagttacaccttcgaggacgtgcctttccacagcagctacgcgcacagccagagcctggaccggctgatgaatcctctgattgaccagtacctgtactacttgtctcggactcaaacaacaggaggcacggcaaatacgcagactctgggcttcagccaaggtgggcctaatacaatggccaatcaggcaaagaactggctgccaggaccctgttaccgccaacaacgcgtctcaacgacaaccgggcaaaacaacaatagcaactttgcctggactgctgggaccaaataccatctgaatggaagaaattcattggctaatcctggcatcgctatggcaacacacaaagacgacaaggagcgtttttttcccagtaacgggatcctgatttttggcaaacaaaatgctgccagagacaatgcggattacagcgatgtcatgctcaccagcgaggaagaaatcaaaaccactaaccctgtggctacagaggaatacggtatcgtggcagataacttgcagcagcaaaacacggctcctcaaattggaactgtcaacagccagggggccttacccggtatggtctggcagaaccgggacgtgtacctgcagggtcccatctgggccaagattcctcacacggacggcaacttccacccgtctccgctgatgggcggctttggcctgaaacatcctccgcctcagatcctgatcaagaacacgcctgtacctgcggatcctccgaccaccttcaaccagtcaaagctgaactctttcatcacgcaatacagcaccggacaggtcagcgtggaaattgaatgggagctgcagaaggaaaacagcaagcgctggaaccccgagatccagtacacctccaactactacaaatctacaagtgtggactttgctgttaatacagaaggcgtgtactctgaaccccaccccattggcacccgttacctcacccgtcccctgtaa

SEQ ID NO: 1011 - DNA, 2211 bp, Artificial Sequence
  source: /note="Description of Artificial Sequence: Synthetic polynucleotide"
atggctgccgatggttatcttccagattggctcgaggacaacctctctgagggcattcgcgagtggtgggcgctgaaacctggagccccgaagcccaaagccaaccagcaaaagcaggacgacggccggggtctggtgcttcctggctacaagtacctcggacccttcaacggactcgacaagggggagcccgtcaacgcggcggacgcagcggccctcgagcacgacaaggcctacgaccagcagctcaaagcgggtgacaatccgtacctgcggtataaccacgccgacgccgagtttcaggagcgtctgcaagaagatacgtcttttgggggcaacctcgggcgagcagtcttccaggccaagaagcgggttctcgaacctctcggtctggttgaggaaggcgctaagacggctcctggaaagaaacgtccggtagaacagtcgccacaagagccagactcctcctcgggcatcggcaagacaggccagcagcccgctaaaaagagactcaattttggtcagactggcgactcagagtcagtccccgatccacaacctctcggagaacctccagcaacccccgctgctgtgggacctactacaatggcttcaggcggtggcgcaccaatggcagacaataacgaaggcgccgacggagtgggtagttcctcgggaaattggcattgcgattcccaatggctgggggacagagtcatcaccaccagcacccgaacctgggccctgcccacctacaacaaccacctctacaagcaaatctccagtgcttcaacgggggccagcaacgacaaccactacttcggctacagcaccccctgggggtattttgatttcaacagattccactgccatttctcaccacgtgactggcagcgactcatcaacaacaactggggattccggcctaagcgactcaacttcaagctcttcaacattcaggtcaaagaggttacggacaacaatggagtcaagaccatcgccaataaccttaccagcacggtccaggtcttcacggactcggagtaccagttgccgtacgtcctcggctctgcgcaccaggactgcctccctccgttcccggcggacgtgttcatgattccgcagtacggctacctaacgctcaacaatggcagccaggcagtgggacggtcatccttttactgcctggaatatttcccatcgcagatgctgagaacgggcaacaactttaccttcagctacacctttgaggacgttcctttccacagcagctacgctcacagccagagtctggaccgtctcatgaatcctctgattgaccagtacctgtactacttgtctcggactcaaacaacaggaggcacggcaaatacgcagactctgggcttcagccaaggtgggcctaatacaatggccaatcaggcaaagaactggctgccaggaccctgttaccgccaacaacgcgtctcaacgacaaccggacaaaacaacaatagcaactttgcctggactgctgggaccaaataccatctgaatggaagaaattcattggctaatcctggcatcgctatggcaacacacaaagacgacaaggagcgtttttttcccagtaacgggatcctgatttttggcaaacaaaatgctgccagagacaatgcggattacagcgatgtcatgctcaccagcgaggaagaaatcaaaaccactaaccctgtggctacagaggaatacggtatcgtggcagataacttgcagcagcaaaacacggctcctcaaattggaactgtcaacagccagggggccttacccggtatggtctggcagaaccgggacgtgtacctgcagggtcccatctgggccaagattcctcacacggacggcaacttccacccgtctccgctgatgggcggctttggcctgaaacatcctccgcctcagatcctgatcaagaacacgcctgtacctgcggatcctccgaccaccttcaaccagtcaaagctgaactctttcatcacgcaatacagcaccggacaggtcagcgtggaaattgaatgggagctgcagaaggaaaacagcaagcgctggaaccccgagatccagtacacctccaactactacaaatctacaagtgtggactttgctgttaatacagaaggcgtgtactctgaaccccaccccattggcacccgttacctcacccgtcccctgtaa

SEQ ID NO: 1012 - DNA, 2211 bp, Artificial Sequence
  source: /note="Description of Artificial Sequence: Synthetic polynucleotide"
atggctgccgatggttatcttccagattggctcgaggacaacctctctgagggcattcgcgagtggtgggacttgaaacctggagccccgaagcccaaagccaaccagcaaaagcaggacgacggccggggtctggtgcttcctggctacaagtacctcggacccttcaacggactcgacaagggggagcccgtcaacgcggcggacgcagcggccctcgagcacgacaaggcctacgaccagcagctcaaagcgggtgacaatccgtacctgcggtataaccacgccgacgccgagtttcaggagcgtctgcaagaagatacgtcttttgggggcaacctcgggcgagcagtcttccaggccaagaagcgggttctcgaacctctcggtctggttgaggaaggcgctaagacggctcctggaaagaaacgtccggtagagcagtcaccacaagagccagactcctcctcgggcatcggcaagacaggccagcagcccgctaaaaagagactcaattttggtcagactggcgactcagagtcagtccccgacccacaacctctcggagaacctccagcaacccccgctgctgtgggacctactacaatggcttcaggcggtggcgcaccaatggcagacaataacgaaggtgccgacggagtgggtaatgcctcaggaaattggcattgcgattccacatggctgggcgactgagtcatcaccaccagcacccgcacctgggccttgcccacctacaataaccacctctacaagcaaatctccagtgcttcaacgggggccagcaacgacaaccactacttcggctacagcaccccctgggggtattttgatttcaacagattccactgccacttttcaccacgtgactggcagcgactcatcaacaacaattggggattccggcccaagagactcaacttcaaactcttcaacatccaagtcaaggaggtcacgcagaatgaaggcaccaagaccatcgccaataacctcaccagcaccatccaggtgtttacggactcggagtaccagctgccgtacgttctcggctctgcccaccagggctgcctgcctccgttcccggcggacgtgttcatgattccccagtacggctacctaacgctcaacaatggcagccaggcagtgggacggtcatccttttactgcctggaatactttccttcgcagatgctgagaaccggcaacaacttccagtttacttacaccttcgaggacgtgcctttccacagcagctacgcccacagccagagcttggaccggctgatgaatcctctgattgaccagtacctgtactacttgtctcggactcaaacaacaggaggcacggcaaatacgcagactctgggcttcagccaaggtgggcctaatacaatggccaatcaggcaaagaactggctgccaggaccctgttaccgccaacaacgcgtctcaacgacaaccgggcaaaacaacaatagcaactttgcctggactgctgggaccaaataccatctgaatggaagaaattcattggctaatcctggcatcgctatggcaacacacaaagacgacaaggagcgtttttttcccagtaacgggatcctgatttttggcaaacaaaatgctgccagagacaatgcggattacagcgatgtcatactcaccagcgaggaagaaatcaaaaccactaaccctgtggctacagaggaatacggtatcgtggcagataacttgcagcagcaaaacacggctcctcaaattggaactgtcaacagccagggggccttacccggtatggtctggcagaaccgggacgtgtacctgcagggtcccatctgggccaagattcctcacacggacggcaacttccacccgtctccgctgatgggcggctttggcctgaaacatcctccgcctcagatcctgatcaagaacacgcctgtacctgcggatcctccgaccaccttcaaccagtcaaagctgaactctttcatcacgcaatacagcaccggacaggtcagcgtggaaattgaatgggagctgcagaaggaaaacagcaagcgctggaaccccgagatccagtacacctccaactactacaaatctacaagtgtggactttgctgttaatacagaaggcgtgtactctgaaccccaccccattggcacccgttacctcacccgtcccctgtaa

SEQ ID NO: 1013 - DNA, 2211 bp, Artificial Sequence
  source: /note="Description of Artificial Sequence: Synthetic polynucleotide"
atggctgccgatggttatcttccagattggctcgaggacactctctctgaaggaataagacagtggtggaagctcaaacctggcccaccaccaccaaagcccgcagagcggcataaggacgacagcaggggtcttgtgcttcctgggtacaagtacctcggacccttcaacggactcgacaagggagagccggtcaacgaggcagacgccgcggccctcgagcacgacaaagcctacgaccggcagctcgacagcggagacaacccgtacctcaagtacaaccacgccgacgcggagtttcaggagcgccttaaagaagatacgtcttttgggggcaacctcgggcgagcagtcttccaggccaagaagagggttctcgaaccttttggtctggttgaggaaggtgctaagacggctcctggaaagaaacgtccggtagagcagtcgccacaagagccagactcctcctcgggcattggcaagacaggccagcagcccgctaaaaagagactcaattttggtcagactggcgactcagagtcagtccccgacccacaacctctcggagaacctccagcaacccccgctgctgtgggacctactacaatggcttcaggcggtggcgcaccaatggcagacaataacgaaggcgccgacggagtgggtaatgcctcaggaaattggcattgcgattccacatggctgggcgacagagtcatcaccaccagcacccgaacatgggccttgcccacctataacaaccacctctacaagcaaatctccagtacttcaacgggggccagtaacgacaaccactacttcggctacagcaccccctgggggtattttgacttcaacagattccactgccacttctcaccacgtgactggcagcgactcatcaacaacaactggggattccggcctaagcgactcaacttcaagctcttcaacattcaggtcaaagaggttacggacaacaatggagtcaagaccatcgccaataaccttaccagcacggtccaggtcttcacggactcggagtaccagttgccgtacgtcctcggctctgcgcaccagggctgcctgcctccgttcccggcggacgtgttcatgattccgcagtacggctacctaacgctcaacaatggcagccaggcagtgggacggtcatccttttactgcctggaatatttcccatcgcagatgctgagaacgggcaacaactttaccttcagctacacttttgaggacgttcctttccacagcagctacgctcacagccagagtctggaccgtctcatgaatcctctgattgaccagtacctgtactacttgtctcggactcaaacaacaggaggcacggcaaatacgcagactctgggcttcagccaaggtgggcctaatacaatggccaatcaggcaaagaactggctgccaggaccctgttaccgccaacaacgcgtctcaacgacaaccggacaaaacaacaatagcaactttgcctggactgctgggaccaaataccatctgaatggaagaaattcattggctaatcctggcatcgctatggcaacacacaaagacgacaaggagcgtttttttcccagtaacgggatcctgatttttggcaaacaaaatgctgccagagacaatgcggattacagcgatgtcatgctcaccagcgaggaagaaatcaaaaccactaaccctgtggctacagaggaatacggtatcgtggcagataacttgcagcagcaaaacacggctcctcaaattggaactgtcaacagccagggggccttacccggtatggtctggcagaaccgggacgtgtacctgcagggtcccatctgggccaagattcctcacacggacggcaacttccacccgtctccgctgatgggcggctttggcctgaaacatcctccgcctcagatcctgatcaagaacacgcctgtacctgcggatcctccgaccaccttcaaccagtcaaagctgaactctttcatcacgcaatacagcaccggacaggtcagcgtggaaattgaatgggagctgcagaaggaaaacagcaagcgctggaaccccgagatccagtacacctccaactactacaaatctacaagtgtggactttgctgttaatacagaaggcgtgtactctgaaccccaccccattggcacccgttacctcacccgtcccctgtaa

SEQ ID NO: 1014 - DNA, 2208 bp, Artificial Sequence
  source: /note="Description of Artificial Sequence: Synthetic polynucleotide"
atggctgccgatggttatcttccagattggctcgaggacaacctctctgagggcattcgcgagtggtgggacttgaaacctggagccccgaagcccaaagccaaccagcaaaagcaggacgacggccggggtctggtgcttcctggctacaagtacctcggacccttcaacggactcgacaagggggagcccgtcaacgcggcggatgcagcggccctcgagcacgacaaggcctacgaccggcagctcgacagcggagacaacccgtacctgcggtataaccacgccgacgcggagtttcaggagcgccttaaagaagatacgtcttttgggggcaacctcgggcgagcagtcttccaggccaagaagagggttctcgaaccttttggtctggttgaggaaggtgctaagacggctcctggaaagaaacgtccggtagagcagtcgccacaagagccagactcctcctcgggcattggcaagacaggccagcagcccgctaaaaagagactcaattttggtcagactggcgactcagagtcagtccccgacccacaacctctcggagaacctccagcaacccccgctgctgtgggacctactacaatggcttcaggcggtggcgcaccaatggcagacaataacgaaggcgccgacggagtgggtaatgcctcaggaaattggcattgcgattccacatggctgggcgacagagtcatcaccaccagcacccgcacctgggccttgcccacctacaataaccacctctacaagcaaatctccagtgcttcaacgggggccagcaacgacaaccactacttcggctacagcaccccctgggggtattttgactttaacagattccactgccacttttcaccacgtgactggcaaagactcatcaacaacaactggggattccggcccaagagactcaacttcaagctcttcaacatccaggtcaaggaggtcacgcagaatgaaggcaccaagaccatcgccaataaccttaccagcacgattcaggtctttacggactcggaataccagctcccgtacgtcctcggctctgcgcaccagggctgcctccctccgttcccggcggacgtgttcatgattccgcagtacggctacctaacactcaacaacggtagtcaggccgtgggacgctcctccttctactgcctggaatactttccttcgcagatgctgagaaccggcaacaacttccagtttacttacaccttcgaggacgtgcctttccacagcagctacgcccacagccagagcttggaccggctgatgaatcctctgattgaccagtacctgtactacttgtctcggactcaaacaacaggaggcacggcaaatacgcagactctgggcttcagccaaggtgggcctaatacaatggccaatcaggcaaagaactggctgccaggaccctgttaccgccaacaacgcgtctcaacgacaaccgggcaaaacaacaatagcaactttgcctggactgctgggaccaaataccatctgaatggaagaaattcactggctaatcctggcatcgctatggcaacacacaaagacgacaggagcgtttttttccagtaccgggatcctgattttggcaaacaaaatgctgccagagacaatgcggattacagcgatgtcatgctcaccagcgaggaagaaatcaaaaccactaaccctgtggctacagaggaatacggtatcgtggcagataacttgcagcagcaaaacacggctcctcaaattggaactgtcaacagccagggggccttacccggtatggtctggcagaaccgggacgtgtacctgcagggtcccatctgggccaagattcctcacacggacggcaacttccacccgtctccgctgatgggcggctttggcctgaaacatcctccgcctcagatcctgatcaagaacacgcctgtacctgcggatcctccgaccaccttcaaccagtcaaagctgaactctttcatcacgcaatacagcaccggacaggtcagcgtggaaattgaatgggagctgcagaaggaaaacagcaagcgctggaaccccgagatccagtacacctccaactactacaaatctacaagtgtggactttgctgttaatacagaaggcgtgtactctgaaccccaccccattggcacccgttacctcacccgtcccctgtaa

SEQ ID NO: 1015 - DNA, 2211 bp, Artificial Sequence
  source: /note="Description of Artificial Sequence: Synthetic polynucleotide"
atggctgccgatggttatcttccagattggctcgaggacaacctctctgagggcattcgcgagtggtgggcgctgaaacctggagccccgaagcccaaagccaaccagcaaaagcaggacgacggccggggtctggtgcttcctggctacaagtacctcggacccttcaacggactcgacaagggggagcccgtcaacgcggcggatgcagcagccctcgaacacgacaaagcttacgaccagcagctcaaggccggtgacaacccctacctcaagtataaccacgccgacgccgagtttcaggagcgtcttcaaggagatacgtcttttgggggcaacctcggacgagcagtcttccaggccaagaagcgggttctcgaacctcttggtctggttgaggaagcggctaagacggctcctggaaagaagaggcctgtagagcagtctcctcaggaaccggactcctccgcgggtattggcaaatcgggtgcacagcccgctaaaaagagactcaatttcggtcagactggcgacacagagtcagtcccagaccctcaacctctcggagaacctccagcagcgccctctggtgtgggacctaatacaatggctgcaggcggtggcgcaccaatggcagacaataacgaaggtgccgatggagtgggtagttcctcgggaaattggcattgcgattcccaatggctgggggacagagtcatcaccaccagcacccgaacctgggccctgcccacctacaacaaccacctctacaagcaaatctccagtgcttcaacgggggccagcaacgacaaccactacttcggctacagcaccccttgggggtattttgacttcaacagattccactgccacttttcaccacgtgactggcagcgactcatcaacaacaactggggattccggcctaagcgactcaacttcaagctcttcaacattcaggtcaaagaggttacggacaacaatggagtcaagaccatcgccaataaccttaccagcacggtccaggtcttcacggactcagactatcagctcccgtacgtgctcgggtcggctcacgagggctgcctccctccgttcccggcggacgtgttcatgattccgcagtacggctacctaacgctcaacaatggcagccaggcagtgggacggtcatccttttactgcctggaatactttccttcgcagatgctgagaaccggcaacaacttccagtttacttacaccttcgaggacgtgcctttccacagcagctacgctcacagccagagtctggaccgtctcatgaatcctctgattgaccagtacctgtactacttgtctcggactcaaacaacaggaggcacggcaaatacgcagactctgggcttcagccaaggtgggcctaatacaatggccaatcaggcaaagaactggctgccaggaccctgttaccgccaacaacgcgtctcaacgacaaccgggcaaaacaacaatagcaactttgcctggactgctgggaccaaataccatctgaatggaagaaattcattggctaatcctggcatcgctatggcaacacacaaagacgacaaggagcgtttttttcccagtaacgggatcctgatttttggcaaacaaaatgctgccagagacaatgcggattacagcgatgtcatgctcaccagcgaggaagaaatcaaaaccactaaccctgtggctacagaggaatacggtatcgtagcagataacttgcagcagcaaaacacggctcctcaaattggaactgtcaacagccagggggccttacccggtatggtctggcagaaccgggacgtgtacctgcagggtcccatctgggccaagattcctcacacggacggcaacttccacccgtctccgctgatgggcggctttggcctgaaacatcctccgcctcagatcctgatcaagaacacgcctgtacctgcggatcctccgaccaccttcaaccagtcaaagctgaactctttcatcacgcaatacagcaccggacaggtcagcgtggaaattgaatgggagctgcagaaggaaaacagcaagcgctggaaccccgagatccagtacacctccaactactacaaatctacaagtgtggactttgctgttaatacagaaggcgtgtactctgaaccccaccccattggcacccgttacctcacccgtcccctgtaa

SEQ ID NO: 1016 - DNA, 2211 bp, Artificial Sequence
  source: /note="Description of Artificial Sequence: Synthetic polynucleotide"
atggctgccgatggttatcttccagattggctcgaggacactctctctgaaggaataagacagtggtggaagctcaaacctggcccaccaccaccaaagcccgcagagcggcataaggacgacagcaggggtcttgtgcttcctgggtacaagtacctcggacccttcaacggactcgacaagggagagccggtcaacgaggcagacgccgcggccctcgagcacgacaaagcctacgaccggcagctcgacagcggagacaacccgtacctcaagtacaaccacgccgacgcggagtttcaggagcgccttaaagaagatacgtcttttgggggcaacctcgggcgagcagtcttccaggccaagaagagggttctcgaaccttttggtctggttgaggaagcggctaagacggctcctggaaagaaacgtccggtagagcagtcgccacaagagccagactcctcctcgggcattggcaagacaggccagcagcccgctaaaaagagactcaattttggtcagactggcgactcagagtcagtccccgacccacaacctctcggagaacctccagcaacccccgctgctgtgggacctactacaatggcttcaggcggtggcgcaccaatggcagacaataacgaaggcgccgacggagtgggtaatgcctcaggaaattggcattgcgattccacatggctgggcgacagagtcatcaccaccagcacccgaacatgggccttgcccacctataacaaccacctctacaagcaaatctccagtgcttcaacgggggccagcaacgacaaccactacttcggctacagcaccccctgggggtattttgacttcaacagattccactgccacttctcaccacgtgactggcagcgactcatcaacaacaactggggattccggcctaagcgactcaacttcaagctcttcaacattcaggtcaaagaggttacggacaacaatggagtcaagaccatcgccaataaccttaccagcacggtccaggtcttcacggactcagactatcagctcccgtacgtgctcgggtcggctcacgagggctgcctcccgccgttcccagcggacgttttcatgattcctcagtacggctacctaacactcaacaacggtagtcaggccgtgggacgctcctccttctactgcctggaatactttccttcgcagatgctgagaacgggcaacaactttaccttcagctacacctttgaggacgttcctttccacagcagctacgctcacagccagagtctggaccgtctcatgaatcctctgattgaccagtacctgtactacttgtctcggactcaaacaacaggaggcacggcaaatacgcagactctgggcttcagccaaggtgggcctaatacaatggccaatcaggcaaagaactggctgccaggaccctgttaccgccaacaacgcgtctcaacgacaaccgggcaaaacaacaatagcaactttgcctggactgctgggacaaaataccatctgaatggaagaaattcattggctaatcctggcatcgctatggcaacacacaaagacgacaaggagcgtttttttcccagtaacgggattctgatttttggcaaacaaaatgctgccagagacaatgcggattacagcgatgtcatgctcaccagcgaggaagaaatcaaaaccactaaccctgtggctacagaggaatacggtatcgtggcagataacttgcagcagcaaaacacggctcctcaaattggaactgtcaacagccagggggccttacccggtatggtctggcagaaccgggacgtgtacctgcagggtcccatctgggccaagattcctcacacggacggcaacttccacccgtctccgctgatgggcggctttggacttaagcacccgcctcctcagatcctcatcaaaaacacgcctgttcctgcggatcctccgaccaccttcaaccagtcaaagctgaactctttcatcacgcaatacagcaccggacaggtcagcgtggaaattgaatgggagctgcagaaggaaaacagcaagcgctggaaccccgagatccagtacacctccaactactacaaatctacaagtgtggactttgctgttaatacagaaggcgtgtactctgaaccccaccccattggcacccgttacctcacccgtcccctgtaa

SEQ ID NO: 1017 - DNA, 2211 bp, Artificial Sequence
  source: /note="Description of Artificial Sequence: Synthetic polynucleotide"
atggctgccgatggttatcttccagattggctcgaggacaacctctctgagggcattcgcgagtggtgggcgctgaaacctggagccccgaagcccaaagccaaccagcaaaagcaggacgacggccggggtctggtgcttcctggctacaagtacctcggacccttcaacggactcgacaaaggagagccggtcaacgcggcggacgcagcggccctcgagcacgacaaggcctacgaccagcagctcaaagcgggtgacaatccgtacctgcggtataaccacgccgacgccgagtttcaggagcgtctgcaagaagatacgtcttttgggggcaacctcgggcgagcagtcttccaggccaagaagcgggttctcgaacctctcggtctggttgaggaaggcgctaagacggctcctggaaagaaacgtccggtagagcagtcgccacaagagccagactcctcctcgggcatcggcaagacaggccagcagcccgctaaaaagagactcaattttggtcagactggcgactcagagtcagtccccgacccacaacctctcggagaacctccagcaacccccgctgctgtgggacctactacaatggcttcaggcggtggcgcaccaatggcagacaataacgaaggcgccgacggagtgggtagttcctcgggaaattggcattgcgattccacatggctgggcgacagagtcatcaccaccagcacccgcacctgggccttgcccacctacaataaccacctctacaagcaaatctccagtgcttcaacgggggccagcaacgacaaccactacttcggctacagcaccccctgggggtattttgacttcaacagattccactgccacttctcaccacgtgactggcagcgactcatcaacaacaactggggattccggcctaagcgactcaacttcaagctcttcaacattcaggtcaaagaggttacggacaacaatggagtcaagaccatcgccaataaccttaccagcacggtccaggtcttcacggactcggagtaccagttgccgtacgtcctcggctctgcgcaccagggctgcctccctccgttcccggcggacgtgttcatgattccgcagtacggctacctaacgctcaacaatggcagccaggcagtgggacggtcatccttttactgcctggaatatttcccatcgcagatgctgagaacgggcaacaactttaccttcagctacacctttgaggacgttcctttccacagcagctacgctcacagccagagtctggaccgtctcatgaatcctctgattgaccagtacctgtactacttgtctcggactcaaacaacaggaggcacggcaaatacgcagactctgggcttcagccaaggtgggcctaatacaatggccaatcaggcaaagaactggctgccaggaccctgttaccgccaacaacgcgtctcaacgacaaccgggcaaaacaacaatagcaactttgcctggactgctgggaccaaataccatctgaatggaagaaattcattggctaatcctggcatcgctatggcaacacacaaagacgacaaggagcgtttttttcccagtaacgggatcctgatttttggcaaacaaaatgctgccagagacaatgcggattacagcgatgtcatgctcaccagcgaggaagaaatcaaaaccactaaccctgtggctacagaggaatacggtatcgtggcagataacttgcagcagcaaaacacggctcctcaaattggaactgtcaacagccagggggccttacccggtatggtctggcagaaccgggatgtgtacctgcagggtcccatctgggccaagattcctcacacggacggcaacttccacccgtctccgctgatgggcggctttggcctgaaacatcctccgcctcagatcctgatcaagaacacgcctgtacctgcggatcctccgaccaccttcaaccagtcaaagctgaactctttcatcacgcaatacagcaccggacaggtcagcgtggaaattgaatgggagctgcagaaggaaaacagcaagcgctggaaccccgagatccagtacacctccaactactacaaatctacaagtgtggactttgctgttaatacagaaggcgtgtactctgaaccccaccccattggcacccgttacctcacccgtcccctgtaa

SEQ ID NO: 1018 - DNA, 2214 bp, Artificial Sequence
  source: /note="Description of Artificial Sequence: Synthetic polynucleotide"
atggctgccgatggttatcttccagattggctcgaggacaaccttagtgaaggaattcgcgagtggtgggcgctgaaacctggagccccgaagcccaaagccaaccagcaaaagcaggacgacggccggggtctggtgcttcctggctacaagtacctcggacccttcaacggactcgacaagggggagcccgtcaacgcggcggacgcagcggccctcgagcacgacaaggcctacgaccagcagctcaaagcgggtgacaatccgtacctgcggtataaccacgccgacgccgagtttcaggagcgtctgcaagaagatacgtcttttgggggcaacctcgggcgagcagtcttccaggccaagaagcgggttctcgaacctctcggtctggttgaggaaggcgctaagacggctcctggaaagaaacgtccggtagagcagtcgccacaagagccagactcctcctcgggcatcggcaagacaggccagcagcccgctaaaaagagactcaatttcggtcagactggcgacacagagtcagtcccagaccctcaaccaatcggagaacctcccgcagccccctcaggtgtgggatctcttacaatggcttcaggtggtggcgcaccagtggcagacaataacgaaggtgccgatggagtgggtagttcctcgggaaattggcattgcgattcccaatggctgggggacagagtcatcaccaccagcaccagaacctgggccttgcccacctacaataaccacctctacaagcaaatctccaacagcacatctggaggatcttcaaatgacaacgcctacttcggctacagcaccccctgggggtattttgactttaacagattccactgccacttttcaccacgtgactggcagcgactcatcaacaacaactggggattccgacccaagagactcaacttcaagctcttcaacatccaggtcaaggaggtcacgcagaacgaaggcaccaagaccatcgccaataacctcaccagcaccatccaggtgtttacggactcggagtaccagctgccgtacgttctcggctccgcccaccagggctgcctgcctccgttcccggcggacgtgttcatgattccccagtacggctacctaacgctcaacaacggtagtcaggccgtgggacgctcctccttctactgcctggaatactttccttcgcagatgctgagaaccggcaacaacttccagtttacttacaccttcgaggacgtgcctttccacagcagctacgcgcacagccagagcttggaccggctgatgaatcctctgattgaccagtacctgtactacttgtctcggactcaaacaacaggaggcacggcaaatacgcagactctgggcttcagccaaggtgggcctaatacaatggccaatcaggcaaagaactggctgccaggaccctgttaccgccaacaacgcgtctcaacgacaaccgggcaaaacaacaatagcaactttgcctggactgctgggaccaaataccatctgaatggaagaaattcattggctaatcctggcatcgctatggcaacacacaaagacgacaaggagcgtttttttcccagtaacgggatcctgatttttggcaaacaaaatgctgccagagacaatgcggattacagcgatgtcatgctcaccagcgaggaagaaatcaaaaccactaaccctgtggctacagaggaatacggtatcgtggcagataacttgcagcagcaaaacacggctcctcaaattggaactgtcaacagccagggggccttacccggtatggtctggcagaaccgggacgtgtacctgcagggtcccatctgggccaagattcctcacacggacggcaacttccacccgtctccgctgatgggcggctttggcctgaaacatcctccgcctcagatcctgatcaagaacacgcctgtacctgcggatcctccgaccaccttcaaccagtcaaagctgaactctttcatcacgcaatacagcaccggacaggtcagcgtggaaattgaatgggagctgcagaaggaaaacagcaagcgctggaaccccgagatccagtacacctccaactactacaaatctacaagtgtggactttgctgttaatacagaaggcgtgtactctgaaccccaccccattggcactcgttacctcacccgtcccctgtaa

SEQ ID NO: 1019 - DNA, 2211 bp, Artificial Sequence
  source: /note="Description of Artificial Sequence: Synthetic polynucleotide"
atggctgccgatggttatcttccagattggctcgaggacaacctctctgagggcattcgcgagtggtgggcgctgaaacctggagccccgaagcccaaagccaaccagcaaaagcaggacgacggccggggtctggtgcttcctggctacaagtacctcggacccttcaacggactcgacaagggggagcccgtcaacgcggcggatgcagcagccctcgaacacgacaaagcttacgaccagcagctcaaggccggtgacaacccctacctcaagtataaccacgccgacgccgagtttcaggagcgtcttcaaggagatacgtcttttgggggcaacctcggacgagcagtcttccaggccaagaagcgggttctcgaacctcttggtctggttgaggaagcggctaagacggctcctggaaagaagaggcctgtagagcagtctcctcaggaaccggactcctccgcgggtattggcaaatcgggtgcacagcccgctaaaaagagactcaatttcggtcagactggcgacacagagtcagtcccagaccctcaacctctcggagaacctccagcagcgccctctggtgtgggacctaatacaatggctgcaggcggtggcgcaccaatggcagacaataacgaaggtgccgatggagtgggtagttcctcgggaaattggcattgcgattcccaatggctgggggacagagtcatcaccaccagcacccgaacctgggccctgcccacctacaacaaccacctctacaagcaaatctccagtgcttcaacgggggccagcaacgacaaccactacttcggctacagcaccccttgggggtattttgacttcaacagattccactgccacttctcaccacgtgactggcagcgactcatcaacaacaactggggattccggcctaagcgactcaacttcaagctcttcaacattcaggtcaaagaggttacggacaacaatggagtcaagaccatcgccaataaccttaccagcacggtccaggtcttcacggactcggagtaccagttgccgtacgtcctcggctctgcgcaccagggctgcctccctccgttcccggcggacgtgttcatgattccgcagtacggctacctaacgctcaacaatggcagccaggcagtgggacggtcatccttttactgcctggaatatttcccatcgcagatgctgagaacgggcaacaactttaccttcagctacacctttgaggacgttcctttccacagcagctacgctcacagccagagtctggaccgtctcatgaatcctctgattgaccagtacctgtactacttgtctcggactcaaacaacaggaggcacggcaaatacgcagactctgggcttcagccaaggtgggcctaatacaatggccaatcaggcaaagaactggctgccaggaccctgttaccgccaacaacgcgtctcaacgacaaccgggcaaaacaacaatagcaactttgcctggactgctgggaccaaataccatctgaatggaagaaattcattggctaatcctggcatcgctatggcaacacacaaagacgacaaggagcgtttttttcccagtaacgggatcctgatttttgacaaacaaaatgctgccagagacaatgcggattacagcgatgtcatgctcaccagcgaggaagaaatcaaaaccactaaccctgtggctacagaggaatacggtatcgtggcagataacttgcagcagcaaaacacggctcctcaaattggaactgtcaacagccagggggccttacccggtatggtctggcagaaccgggatgtgtacctgcagggtcccatctgggccaagattcctcacacggacggcaacttccacccgtctccgctgatgggcggctttggcctgaaacatcctccgcctcagatcctgatcaagaacacgcctgtacctgcggatcctccgaccaccttcaaccagtcaaagctgaactctttcatcacgcaatacagcaccggacaggtcagcgtggaaattgaatgggagctgcagaaggaaaacagcaagcgctggaaccccgagatccagtacacctccaactactacaaatctacaagtgtggactttgctgttaatacagaaggcgtgtactctgaaccccaccccattggcacccgttacctcacccgtcccctgtaa

SEQ ID NO: 1020 - DNA, 2211 bp, Artificial Sequence
  source: /note="Description of Artificial Sequence: Synthetic polynucleotide"
atggctgccgatggttatcttccagattggctcgaggacactctctctgaaggaataagacagtggtggaagctcaaacctggcccaccaccaccaaagcccgcagagcggcataaggacgacagcaggggtcttgtgcttcctgggtacaagtacctcggacccttcaacggactcgacaagggagagccggtcaacgaggcagacgccgcggccctcgagcacgacaaagcctacgaccggcagctcgacagcggagacaacccgtacctcaagtacaaccacgccgacgcggagtttcaggagcgccttaaagaagatacgtcttttgggggcaacctcggacgagcagtcttccaggcgaaaaagagggttcttgaacctctgggcctggttgaggaacctgttaagacggctccgggaaaaaagaggccggtagagcactctcctgtggagccagactcctcctcgggaaccggaaaggcgggccagcagcctgcaagaaaaagattgaattttggtcagactggcgactcagagtcagtccccgacccacaacctctcggagaacctccagcaacccccgctgctgtgggacctaatacgatggctacaggcagtggcgcaccaatggcagacaataacgagggcgccgacggagtgggtaattcctcgggaaattggcattgcgattccacatggatgggcgacagagtcatcaccaccagcaccagaacctgggccctgcccacttacaacaaccatctctacaagcaaatctccagtgcttcaacgggggccagcaacgacaaccactacttcggctacagcaccccctgggggtattttgacttcaacagattccactgccacttctcaccacgtgactggcagcgactcatcaacaacaactggggattccggcctaagcgactcaacttcaagctcttcaacattcaggtcaaagaggttacggacaacaatggagtcaagaccatcgccaataaccttaccagcaccatccaggtctttacggactcggaataccagctgccgtacgttctcggctctgcccaccagggctgcctgcctccgttcccggcggacgtgttcatgattccccagtacggctacctaacactcaacaacggtagtcaggccgtgggacgctcctccttctactgcctggaatatttcccatcgcagatgctgagaacgggcaacaactttaccttcagctacacctttgaggacgttcctttccacagcagctacgctcacagccagagtctggaccgtctcatgaatcctctgattgaccagtacctgtactacttgtctcggactcaaacaacaggaggcaaggcaaatacgcagactctgggcttcagccaaggtgggcctaatacaatggccaatcaggcaaagaactggctgccaggaccctgttaccgccaacaacgcgtctcaacgacaaccgggcaaaacaacaatagcaactttgcctggactgctgggaccaaataccatctgaatggaagaaattcattggctaatcctggcatcgctatggcaacacacaaagacgacaaggagcgtttttttcccagtaacgggatcctgatttttggcaaacaaaatgctgccagagacaatgcggattacagcgatgtcatgctcaccagcgaggaagaaatcaaaaccactaaccctgtggctacagaggaatacggtatcgtggcagataacttgcagcagcaaaacacggctcctcaaattggaactgtcaacagccagggggccttacccggtatggtctggcagaaccgggacgtgtacctgcagggtcccatctgggccaagattcctcacacggacggcaacttccacccgtctccgctgatgggcggctttggcctgaaacatcctccgcctcagatcctgatcaagaacacgcctgtacctgcggatcctccgaccaccttcaaccagtcaaagctgaactctttcatcacgcaatacagcaccggacaggtcagcgtggaaattgaatgggagctgcagaaggaaaacagcaagcgctggaaccccgagatccagtacacctccaactactacaaatctacaagtgtggactttgctgttaatacagaaggcgtgtactctgaaccccaccccattggcacccgttacctcacccgtcccctgtaa

SEQ ID NO: 1021 - DNA, 2211 bp, Artificial Sequence
  source: /note="Description of Artificial Sequence: Synthetic polynucleotide"
atggctgccgatggttatcttccagattggctcgaggacaacctctctgagggcattcgcgagtggtgggcgctgaaacctggagccccgaagcccaaagccaaccagcaaaagcaggacgacggccggggtctggtgcttcctggctacaagtacctcggacccttcaacggactcgacaagggggagcccgtcaacgcggcggacgcagcggccctcgagcacgacaaggcctacgaccagcagctcaaagcgggtgacaatccgtacctgcggtataaccacgccgacgccgagtttcaggagcgtctgcaagaagatacgtcttttgggggcaacctcgggcgagcagtcttccaggccaagaagcgggttctcgaaccttttggtctggttgaggaaggtgctaagacggctcctggaaagaaacgtccggtagagcagtcgccacaagagccagactcctcctcgggcatcggcaagacaggccagcagcccgctaaaaagagactcaattttggtcagactggcgactcagagtcagtccccgacccacaacctctcggagaacctccagcaacccccgctgctgtgggacctactacaatggcttcaggcggtggcgcaccaatggcggacaataacgaaggcgccgacggagtgggtaatgcctcaggaaattggcattgcgattccacatggctgggcgacagagtcatcaccaccagcacccgcacctgggccttgcccacctacaataaccacctctacaagcaaatctccagtgcttcaacgggggccagcaacgacaaccactacttcggctacagcaccccctgggggtattttgacttcaacagattccactgccacttttcaccacgtgactggcaaagactcatcaacaacaactggggattccggcctaagcgactcaacttcaagctcttcaacattcaggtcaaagaggttacggacaacaatggagtcaagaccatcgccaataaccttaccagcacggtccaggtcttcacggactcggagtaccagttgccgtacgtcctcggctctgcgcaccagggctgcctccctccgttcccggcggacgtgttcatgattccgcagtacggctacctaacgctcaacaatggcagccaggcagtgggacggtcatccttttactgcctggaatatttcccatcgcagatgctgagaacgggcaacaactttaccttcagctacacctttgaggacgttcctttccacagcagctacgctcacagccagagtctggaccgtctcatgaatcctctgattgaccagtacctgtactacttgtctcggactcaaacaacaggaggcacgggaaatacgcagactctgggcttcagccaaggtgggcctaatacaatggccaatcaggcaaagaactggctgccaggaccctgttaccgccaacaacgcgtctcaacgacaaccgggcaaaacaacaatagcaactttgcctggactgctgggaccaaataccatctgaatggaagaaattcattggctaatcctggcatcgctatggcaacacacaaagacgacaaggagcgtttttttcccagtaacgggatcctgatttttggcaaacaaaatgctgccagagacaatgcggattacagcgatgtcatgctcaccagcgaggaagaaatcaaaaccactaaccctgtggctacagaggaatacggtatcgtggcagataacttgcagcagcaaaacacggctcctcaaattggaactgtcaacagccagggggccttacccggtatggtctggcagaaccgggacgtgtacctgcagggtcccatctgggccaagattcctcacacggacggcaacttccacccgtctccgctgatgggcggctttggcctgaaacatcctccgcctcagatcctgatcaagaacacgcctgtacctgcggatcctccgaccaccttcaaccagtcaaagctgaactctttcatcacgcaatacagcaccggacaggtcagcgtggaaattgaatgggagctgcagaaggaaaacagcaagcgctggaaccccgagatccagtacacctccaactactacaaatctacaagtgtggactttgctgttaatacagaaggcgtgtactctgaaccccaccccattggcacccgttacctcacccgtcccctgtaa

SEQ ID NO: 1022 - DNA, 2211 bp, Artificial Sequence
  source: /note="Description of Artificial Sequence: Synthetic polynucleotide"
atggctgccgatggttatcttccagattggctcgaggacaacctctctgagggcattcgcgagtggtgggacttgaaacctggagccccgaaacccaaagccaaccagcaaaagcaggacgacggccggggtctggtgcttcctggctacaagtacctcggacccttcaacggactcgacaagggggagcccgtcaacgcggcggacgcagcggccctcgagcacgacaaggcctacgaccagcagctcaaagcgggtgacaatccgtacctgcggtataaccacgccgacgccgagtttcaggagcgtctgcaagaagatacgtcttttgggggcaacctcgggcgagcagtcttccaggccaagaagcgggttctcgaacctctcggtctggttgaggaaggcgctaagacggctcctggaaagaagaggcctgtagagcagtcgccacaagagccagactcctcctcgggcatcggcaagacaggccagcagcccgctaaaaagagactcaattttggtcagactggcgactcagagtcagtccccgatccacaacctctcggagaacctccagcaacccccgctgctgtgggacctactacaatggcttcaggcggtggcgcaccaatggcagacaataacgaaggcgccgacggagtgggtagttcctcgggaaattggcattgcgattccacatggctgggcgacagagtcatcaccaccagcacccgaacatgggccttgcccacctataacaaccacctctacaagcaaatctccagtgcttcaacgggggccagcaacgacaaccactacttcggctacagcaccccctgggggtattttgacttcaacagattccactgccacttctcaccacgtgactggcagcgactcatcaacaacaactggggattccggcctaagcgactcaacttcaagctcttcaacatccaggtcaaggaggtcacgcagaatgaaggcaccaagaccatcgccaataacctcaccagcaccatccaggtgtttacggactcggagtaccagcttccgtacgtcctcggctctgcgcaccagggctgcctccctccgttcccggcggacgtgttcatgattccgcagtacggctacctaacgctcaacaatggcagccaggcagtgggacggtcatccttttactgcctggaatatttcccatcgcagatgctgagaacgggcaacaactttaccttcagctacacctttgaggacgttcctttccacagcagctacgcgcacagccagagcttggaccggctgatgaatcctctgattgaccagtacctgtactacttgtctcggactcaaacaacaggaggcacggcaaatacgcagactctgggcttcagccaaggtgggcctaatacaatggccaatcaggcaaagaactggctgccaggaccctgttaccgccaacaacgcgtctcaacgacaaccgggcaaaacaacaatagcaactttgcctggactgctgggaccaaataccatctgaatggaagaaattcattggctaatcctggcatcgctatggcaacacacaaagacgacaaggagcgtttttttcccagtaacgggatcctgatttttggcaaacaaaatgctgccagagacaatgcggattacagcgatgtcatgctcaccagcgaggaagaaatcaaaaccactaaccctgtggctacagaggaatacggtatcgtggcagataacttgcagcagcaaaacacggctcctcaaattggaactgtcaacagccagggggccttacccggtatggtctggcagaaccgggacgtgtacctgcagggtcccatctgggccaagattcctcacacggacggcaacttccacccgtctccgctgatgggcggctttggcctgaaacatcctccgcctcagatcctgatcaagaacacgcctgtacctgcggatcctccgaccaccttcaaccagtcaaagctgaactctttcatcacgcaatacagcaccggacaggtcagcgtggaaattgaatgggagctgcagaaggaaaacagcaagcgctggaaccccgagatccagtacacctccaactactacaaatctacaagtgtggactttgctgttaatacagaaggcgtgtactctgaaccccaccccattggcacccgttacctcacccgtcccctgtaa

SEQ ID NO: 1023 - DNA, 2211 bp, Artificial Sequence
  source: /note="Description of Artificial Sequence: Synthetic polynucleotide"
atggctgccgatggttatcttccagattggctcgaggacaacctctctgagggcattcgcgagtggtgggcgctgaaacctggagccccgaagcccaaagccaaccagcaaaagcaggacgacggccggggtctggtgcttcctggctacaagtacctcggacccttcaacggactcgacaagggggagcccgtcaacgcggcggatgcagcggccctcgagcacgacaaggcctacgaccagcagctcaaagcgggtgacaatccgtacctgcggtataaccacgccgacgccgagtttcaggagcgtctgcaagaagatacgtcttttgggggcaacctcgggcgagcagtcttccaggccaagaagcgggttctcgaacctctcggtctggttgaggaaggcgctaagacggctcctggaaagaaacgtccggtagagcagtcgccacaagagccagactcctcctcgggcatcggcaagacaggccagcagcccgctaaaaagagactcaattttggtcagactggcgactcagagtcagtccccgacccacaacctctcggagaacctccagcaacccccgctgctgtgggacctactacaatggctgcaggcggtggcgcaccaatggcagacaataacgaaggcgccgacggagtgggtagttcctcgggaaattggcattgcgattccacatggatgggcgacagagtcatcaccaccagcacccgaacctgggccttgcccacctataacaaccatctctacaagcaaatctccagtgcttcaacgggggccagcaacgacaaccactacttcggctacagcaccccctgggggtattttgacttcaacagattccactgccacttctcaccacgtgactggcagcgactcatcaacaacaactggggattccggcccaagagactcagcttcaagctcttcaacatccaggtcaaggaggtcacgcagaatgaaggcaccaagaccatcgccaataacctcaccagcaccatccaggtgtttacggactcggagtaccagctgccgtacgtcctcggctctgcgcaccagggctgcctccctccgttcccggcggacgtgttcatgattccgcagtacggctacctaacgctcaacaatggcagccaggcagtgggacggtcatccttttactgcctggaatatttcccatcgcagatgctgagaacgggcaacaactttaccttcagctacacctttgaggacgttcctttccacagcagctacgctcacagccagagcttggaccggctgatgaatcctctgattgaccagtacctgtactacttgtctcggactcaaacaacaggaggcacggcaaatacgcagactctgggtttcagccaaggtgggcctaatacaatggccaatcaggcaaagaactggctgcaaggaccctgttaccgccaacaacgcgtctcaacgacaaccgggcaaaacaacaatagcaactttgcctggactgctgggaccaaataccatctgaatggaagaaattcattggctaatcctggcatcgctatggcaacacacaaagacgacaaggagcgtttttttcccagtaacgggatcctgatttttggcaaacaaaatgctgccagagacaatgcggattacagcgatgtcatgctcaccagcgaggaagaaatcaaaaccactaaccctgtggctacagaggaatacggtatcgtggcagataacttgcagcagcaaaacacggctcctcaaattggaactgtcaacagccagggggccttacccggtatggtctggcagaacctggacgtgtacctgcagggtcccatctgggccaagattcctcacacggacggcaacttccacccgtctccgctgatgggcggctttggcctgaaacatcctccgcctcagatcctgatcaagaacacgcctgtacctgcggatcctccgaccaccttcaaccagtcaaagctgaactctttcatcacgcaatacagcaccggacaggtcagcgtggaaattgaatgggagctgcagaaggaaaacagcaagcgctggaaccccgagatccagtacacctccaactactacaaatctacaagtgtggactttgctgttaatacagaaggcgtgtactctgaaccccaccccattggcacccgttacctcacccgtcccctgtaa

SEQ ID NO: 1024 - DNA, 2214 bp, Artificial Sequence
  source: /note="Description of Artificial Sequence: Synthetic polynucleotide"
atggctgccgatggttatcttccagattggctcgaggacaacctctctgagggcattcgcgagtggtgggcgctgaaacctggagccccgaagcccaaagccaaccagcaaaagcaggacgacggccggggtctggtgcttcctggctacaagtacctcggacccttcaacggactcgacaagggagagcccgtcaacgcggcggacgcagcggccctcgagcacgacaaggcctacgaccagcagctcaaagcgggtgacaatccgtacctgcggtataaccacgccgacgccgagtttcaggagcgtctgcaagaagatacgtcttttgggggcaacctcgggcgagcagtcttccaggccaagaagcgggttctcgaacctctcggtctggttgaggaaggcgctaagacggctcctggaaagaagagaccggtagagccatcaccccagcgttctccagactcctcctcgggcatcggcaagacaggccagcagcccgctaaaaagagactcaattttggtcagactggcgactcagagtcagtccccgacccacaacctctcggagaacctccagcaacccccgctgctgtgggacctactacaatggcttcaggtggtggcgcaccaatggcagacaataacgaaggcgccgacggagtgggtaatgcctcaggaaattggcattgcgattcccaatggctgggcgacagagtcatcaccaccagcacccgaacatgggccttgcccacctataacaaccacctctacaagcaaatctccagtgcttcaacgggggccagcaacgacaaccactacttcggctacagcaccccctgggggtattttgacttcaacagattccactgccacttttcaccacgtgactggcagcgactcatcaacaacaactggggattccggcctaagcgactcaacttcaagctcttcaacattcaggtcaaagaggttacggacaacaatggagtcaagaccatcgccaataaccttaccagcacggtccaggtcttcacggactcagactatcagctcccgtacgtgctcgggtcggctcacgagggctgcctcccgccgttcccagcggacgttttcatgattccccagtacggctacctaacactcaacaacggtagtcaggccgtgggacgctcctccttctactgcctggaatactttccttcgcagatgctgagaaccggcaacaacttccagtttacttacaccttcgaggacgtgcctttccacagcagctacgctcacagccagagcttggaccggctgatgaatcctctgattgaccagtacctgtactacttgtctcggactcaaacaacaggaggcacggcaaatacgcagactttgggcttcagccaaggtgggcctaatacaatggccaatcaggcaaagaactgggtgccaggaccctgttaccgccaacaacgggtttcaacggcaaccgggcaaaacaacaatagcaactttgcctggactgctgggaccaaataccatctgaaaggaagaaattcattggctaatcctggcatcgctatggcaacacacaaagacgacaaggagcgtttttttcccagtaacgggatcctgatttttggcaaacaaaatgctgccagagacaatgcggattacagcgatgtcatgctcaccagcgaggaagaaatcaaaaccactaaccctgtggctacagaggaatacggtatcgtggcagataacttgcagcagcaaaacacggctcctcaaattggaactgtcaacagccagggggccttacccggtatggtctggcagaaccgggacgtgtacctgcagggtcccatctgggccaagattcctcacacggacggcaacttccacccgtctccgctgatgggcggctttggcctgaaacatcctccgcctcagatcctgatcaagaacacgcctgtacctgcggatcctccgaccaccttcaaccagtcaaagctgaactctttcatcacgcaatacagcaccggacaggtcagcgtggaaattgaatgggagctgcagaaggaaaacagcaaacgctggaacccagagattcaatacacttccaactactacaaatctacaagtgtggactttgctgttaatacagaaggcgtgtactctgaaccccaccccattggcacccgttacctcacccgtcccctgtaa

SEQ ID NO: 1025 - DNA, 2214 bp, Artificial Sequence
  source: /note="Description of Artificial Sequence: Synthetic polynucleotide"
  modified_base (676)..(676): a, c, t, or g
  modified_base (697)..(697): a, c, t, or g
  modified_base (715)..(715): a, c, t, or g
  modified_base (748)..(748): a, c, t, or g
  modified_base (750)..(750): a, c, t, or g
  modified_base (757)..(757): a, c, t, or g
  modified_base (763)..(763): a, c, t, or g
atggctgccgatggttatcttccagattggctcgaggacactctctctgaaggaataagacagtggtggaagctcaaacctggcccaccaccaccaaagcccgcagagcggcataaggacgacagcaggggtcttgtgcttcctgggtacaagtacctcggacccttcaacggactcgacaagggagagccggtcaacgaggcagacgccgcggccctcgagcacgacaaagcctacgaccggcagctcgacagcggagacaacccgtacctcaagtacaaccacgccgacgcggagtttcaggagcgccttaaagaagatacgtcttttgggggcaacctcggacgagcagtcttccaggcgaaaaagagggttcttgaacctctcggtctggttgaggaaggcgctaagacggctcctggaaagaaacgtccggtagagcagtcgccacaagagccagactcctcctcgggcatcggcaagacaggccagcagcccgctaaaaagagactcaattttggtcagactggcgactcagagtcagtccccgacccacaacctctcggagaacctccagcaacgccctctggtgtgggacctaatacaatggctgcaggcggtggcgctccaatggcagacaataacgaaggcgccgacggagtgggtagttcctcangaaattggcattgcgattccncatggctgggcgacagantcatcaccaccagcacccgaacctgggccctgncnacctacnacaacnacctctacaagcaaatctccaacagcacatctggaggagccaccaacgacaacacctacttcggctacagcaccccctgggggtattttgactttaacagattccactgccacttttcaccacgtgactggcagcgactcatcaacaacaactggggattccggcctaagcgactcaacttcaagctcttcaacatccaggtcaaggaggtcacgcagaatgaaggcaccaagaccatcgccaataacctcaccagcaccatccaggtgtttacggactcggagtaccagctgccgtacgttctcggctctgcccaccagggctgcctgcctccgttcccggcggacgtgttcatgattccccagtacggctacctaacactcaacaacggtagtcaggccgtgggacgctcctccttctactgcctggaatactttccttcgcagatgctgagaaccggcaacaacttccagtttacttacaccttcgaggacgtgcctttccacagcagctacgcccacagccagagcttggaccggctgatgaatcctctgattgaccagtacctgtactacttgtctcggactcaaacaacaggaggcacggcaaatacgcagactctgggcttcagccaaggtgggcctaatacaatggccaatcaggcaaagaactggctgccaggaccctgttaccgccaacaacgcgtctcaacgacaaccgggcaaaacaacaatagcaactttgcctggactgctgggaccaaataccatctgaatggaagaaattcattggctaatcctggcatcgctatggcaacacacaaagacgacaaggagcgtttttttcccagtaacgggatcctgatttttggcaaacaaaatgctgccagagacaatgcggattacagcgatgtcatgctcaccagcgaggaagaaatcaaaaccactaaccctgtggctacagaggaatacggtatcgtggcagataacttgcagcagcaaaacacggctcctcaaattggaactgtcaacagccagggggccttacccggtatggtttggcagaaccgggacgtgtacctgcagggtcctatctgggccaagattcctcacacggacggaaactttcatccctcgccgctgatgggaggctttggactgaaacacccgcctcctcagatcctgattaagaatacacctgttcccgcggatcctccaactaccttcagtcaagctaagctggcgtcgttcatcacgcaatacagcacaggacaagtgagtgtggaaattgaatgggagctgcagaaagaaaacagcaagcgctggaatcccgaagtgcagtacacatccaattatgcaaaatctgccaacgttgattttactgtggacaacaatggactttatactgagcctcgccccattggcacccgttaccttacccgtcccctgtaa

SEQ ID NO: 1026 - DNA, 2214 bp, Artificial Sequence
  source: /note="Description of Artificial Sequence: Synthetic polynucleotide"
atggctgccgatggttatcttccagattggctcgaggacaacctctctgagggcattcgcgagtggtgggacttgaaacctggagccccgaagcccaaagccaaccagcaaaagcaggacgacggccggggtctggtgcttcctggctacaagtacctcggacccttcaacggactcgacaagggggagcccgtcaacgcggcggacgcagcggccctcgagcacgacaaggcctacgaccagcagctcaaagcgggtgacaatccgtacctgcggtataaccacgccgacgccgagtttcaggagcgtctgcaagaagatacgtcttttgggggcaacctcgggcgagcagtcttccaggccaagaagcgggttctcgaacctctcggtctggttgaggaaggcgctaagacggctcctggaaagaagagaccggtagagccatcaccccagcgttctccagactcctctacgggcatcggcaagaaaggccagcagcccgcgaaaaagagactcaactttgggcagactggcgactcagagtcagtgcccgaccctcaaccaatcggagaaccccccgcaggcccctctggtgtgggatctcttacaatggcttcaggtggtggcgcaccagtggcagacaataacgaaggtgccgatggagtgggtagttcctcgggaaattggcattgcgattcccaatggctgggggacagagtcatcaccaccagcacccgaacatgggccttgcccacctataacaaccacctctacaagcaaatctccagtgcttcaacgggggccagcaacgacaaccactacttcggctacagcaccccctgggggtattttgactttaacagattccactgccacttctcaccacgtgactggcagcgactcatcaacaacaactggggattccggcccaagagactcaacttcaagctcttcaacatccaggtcaaggaggtcacggacaatgatggagtcaagaccatcgccaataaccttaccagcacgattcaggtctttacggactcggaataccagttgccgtacgtcctcggctctgcgcaccagggctgcctgcctccgttcccggcggacgtgttcatgattccgcagtacggctacctaacgctcaacaatggcagccaggcagtgggacggtcatccttttactgcctggaatatttcccatcgcagatgctgagaacgggcaacaactttaccttcagctacacttttgaggacgttcctttccacagcagctacgctcacagccagagtctggaccgtctcatgaatcctctgattgaccagtacctgtactacttgtctcggactcaaacaacaggaggcacggcaaatacgcagactctgggcttcagccaaggtgggcctaatacaatggccaatcacgcaaagaactggctgccaggaccctgttaccgccaacaacgcgtctcaacgacaaccggacaaaacaacaatagcaactttgcctggactgctgggaccaaataccatctgaatggaagaaattcattggctaatcctggcatcgctatggcaacacacaaagacgacaaggagcgtttttttcccagtaacgggatcctgatttttggcaaacaaaatgctgccagagacaatgcggattacagcgatgtcatgctcaccagcgaggaagaaatcaaaaccactaaccctgtggctacagaggaatacggtatcgtggcagataacttgcagcagcaaaacacggctcctcaaattggaactgtcaacagccagggggccttacccggtatggtctggcagaaccgggacgtgtacctgcagggtcccatctgggccaagattcctcacacggacggcaacttccacccgtctccgctgatgggcggctttggcctgaaacatcctccgcctcagatcctgatcaagaacacgcctgtacctgcggatcctccgaccaccttcaaccagtcaaagctgaactctttcatcacgcaatacagcaccggacaggtcagcgtggaaattgaatgggagctgcagaaggaaaacagcaagcgctggaaccccgagatccagtacacctccaactactacaaatctacaagtgtggactttgctgttaatacagaaggcgtgtactctgaaccccaccccattggcacccgttacctcacccgtcccctgtaa

SEQ ID NO: 1027 - DNA, 2211 bp, Artificial Sequence
  source: /note="Description of Artificial Sequence: Synthetic polynucleotide"
atggctgccgatggttatcttccagattggctcgaggacactctctctgaaggaataagacagtggtggaagctcaaacctggcccaccaccaccaaagcccgcagagcggcacaaggacgacagcaggggtcttgtgcttcctgggtacaagtacctcggacccttcaacggactcgacaagggagagccggtcaacgaggcagacgccgcggccctcgagcacgacaaagcctacgaccggcagctcgacagcggagacaacccgtacctcaagtacaaccacgccgacgcggagtttcaggagcgccttaaagaagatacgtcttttgggggcaacctcggacgagcagtcttccaggcgaaaaagagggttcttgaacctctgggcctggttgaggaacctgttaagacggctccgggaaaaaagaggccggtagagcactctcctgtggagccagactcctcctcgggaaccggaaaggcgggccagcagcctgctaaaaagagactcaattttggtcagactggcgactcagagtcagtccccgacccacaacctctcggagaacctccagcaacccccgctgctgtgggacctactacaatggcttcaggtggtggcgcaccaatggcagacaataacgaaggcgccgacggagtgggtaatgcctcaggaaattggcattgcgattccacatggctgggcgacagagtcatcaccaccagcacccgcacctgggccttgcccacctacaataaccacctctacaagcaaatctccagtgcttcaacgggggccagcaacgacaaccactacttcggctacagcaccccctgggggtattttgacttcaacagattccactgccacttctcaccacgtgactggcagcgactcatcaacaacaactggggattccggcccaagagactcaacttcaaactcttcaacatccaagtcaaggaggtcacgcagaatgaaggcaccaagaccatcgccaataacctcaccagcaccatccaggtgtttacggactcggagtaccagctgccgtacgttctcggctctgcccaccagggctgcctgcctccgttcccggcggacgtgttcatgattccccagtacggctacctaacactcaacaacggtagtcaggccgtgggacgctcctccttctactgcctggaatactttccttcgcagatgctgagaaccggcaacaacttccagtttacttacaccttcgaggacgtgcctttccacagcagctacgcgcacagccagagcttggaccggctgatgaatcctctgattgaccagtacctgtactacttgtctcggactcaaacaacaggaggcacggcaaatacgcagactctgggcttcagccaaggtgggcctaatacaatggccaatcaggcaaagaactggctgccaggaccctgttaccgccaacaacgcgtctcaacgacaaccgggcaaaacaacaatagcaactttgcctggactgctgggaccaaataccatctgaatggaagaaattcattggctaatcctggcatcgctatggcaacacacaaagacgacaaggagcgtttttttcccagtaacgggatcctgatttttggcaaacaaaatgctgccagagacaatgcggattacagcgatgtcatgctcaccagcgaggaagaaatcaaaaccactaaccctgtggctacagaggaatacggtatcgtggcagataacttgcagcagcaaaacacggctcctcaaattggaactgtcaacagccagggggccttacccggtatggtctggcagaaccgggacgtgtacctgcagggtcccatctgggccaagattcctcacacggacggcaacttccacccgtctccgctgatgggcggctttggcctgaaacatcctccgcctcagatcctgatcaagaacacgcctgtacctgcggatcctccgaccaccttcaaccagtcaaagctgaactctttcatcacgcaatacagcaccggacaggtcagcgtggaaattgaatgggagctgcagaaggaaaacagcaagcgctggaaccccgagatccagtacacctccaactactacaaatctacaagtgtggactttgctgttaatacagaaggcgtgtactctgaaccccaccccattggcacccgttacctcacccgtcccctgtaa

SEQ ID NO: 1028 - DNA, 2211 bp, Artificial Sequence
  source: /note="Description of Artificial Sequence: Synthetic polynucleotide"
atggctgccgatggttatcttccagattggctcgaggacaacctctctgagggcattcgcgagtggtgggcgctgaaacctggagccccgaagcccaaagccaaccagcaaaagcaggacgacggccggggtctggtgcttcctggctacaagtacctcggacccttcaacggactcgacaagggggagcccgtcaacgcggcggatgcagcggccctcgagcacgacaaggcctacgaccagcagctccaagcgggtgacaatccgtacctgcggtataaccacgccgacgccgagtttcaggagcgtcttcaaggagatacgtcttttgggggcaacctcggacgagcagtcttccaggccaagaagcgggttctcgaacctctcggtctggttgaggaaggcgctaagacggctcctggaaagaaacgtccggtagagcagtcgccacaagagccagactcctcctcgggcatcggcaagacaggccagcagcccgctaaaaagagactcaattttggtcagactggcgactcagagtcagtccccgacccacaacctctcggagaacctccagcaacccccgctgctgtgggacctactacaatggcttcaggcggtggcgcaccaatggcggacaataacgaaggcgccgatggagtgggtaatgcctcaggaaattggcattgcgattccacatggctgggcgacagagtcatcaccaccagcacccgcacctgggccttgcccacctacaataaccacctctacaagcaaatctccagtgcttcaacgggggccagcaacgacaaccactacttcggctacagcaccccctgggggtattttgacttcaacagattccactgccacttctcaccacgtgactggcagcgactcatcaacaacaactggggattccggcctaagcgactcaacttcaagctcttcaacattcaggtcaaagaggttacggacaacaatggagtcaagaccatcgccaataacctcaccagcaccatccaggtgtttacggactcggagtaccagctgccgtacgttctcggctctgcccaccagggctgcctgcctccgttcccggcggacgtgttcatgattccccagtacggctacctaacactcaacaacggtagtcaggccgtgggacgctcctccttctactgcctggaatactttccttcgcagatgctgagaaccggcaacaacttccagtttacttacaccttcgaggacgtgcctttccacagcagctacgcccacagccagagcttggaccggctgatgaatcctctgattgaccagtacctgtactacttgtctcggactcaaacaacaggaggcacggcaaatacgcagactctgggcttcagccaaggtgggcctaatacaatggccaatcaggcaaagaactggctgccaggaccctgttaccgccaacaacgcgtctcaacgacaaccgggcaaaacaacaatagcaactttgcctggactgctgggaccaaataccatctgaatggaagaaattcattggctaatcctggcatcgctatggcaacacacaaagacgacaaggagcgtttttttcccagtaacgggatcctgatttttggcaaacaaaatgctgccagagacaatgcggattacagcgatgtcatgctcaccagcgaggaagaaatcaaaaccactaaccctgtggctacagaggaatacggtatcgtggcagataacttgcagcagcaaaacacggctcctcaaattggaactgtcaacagccagggggccttacccggtatggtctggcagaaccgggacgtgtacctgcagggtcccatctgggccaagattcctcacacggacggcaacttccacccgtctccgctgatgggcggctttggcctgaaacatcctccgcctcagatcctgatcaagaacacgcctgtacctgcggatcctccgaccaccttcaaccagtcaaagctgaactctttcatcacgcaatacagcaccggacaggtcagcgtggaaattgaatgggagctgcagaaggaaaacagcaagcgctggaaccccgagatccagtacacctccaactactacaaatctacaagtgtggactttgctgttaatacagaaggcgtgtactctgaaccccaccccattggcacccgttacctcacccgtcccctgtaa

SEQ ID NO: 1029 - DNA, 2217 bp, Artificial Sequence
  source: /note="Description of Artificial Sequence: Synthetic polynucleotide"
atggctgccgatggttatcttccagattggctcgaggacactctctctgaaggaataagacagtggtggaagctcaaacctggcccaccaccaccaaagcccgcagagcggcataaggacgacagcaggggtcttgtgcttcctgggtacaagtacctcggacccttcaacggactcgacaagggggagcccgtcaacgcggcggatgcagcggccctcgagcacgacaaggcctacgaccagcagctcaaagcgggtgacaatccgtacctgcggtataaccacgccgacgcggagtttcaggagcgccttaaagaagatacgtcttttgggggcaacctcggacgagcagtcttccaggcgaaaaagagggttcttgaacctctcggtctggttgaggaaggcgctaagacggctcctggaaagaagagaccggtagagccatcaccccagcgttctccagactcctctacgggcatcggcaagaaaggccaacagcccgccagaaaaagactcaattttggtcagactggcgactcagagtcagttccagaccctcaacctctcggagaacctccagcagcgccctctggtgtgggacctaatacaatggctgcaggcggtggcgcaccaatggcagacaataacgaaggcgccgacggagtgggtagttcctcgggaaattggcattgcgattcccaatggctgggggacagagtcatcaccaccagcaccagaacctgggccctgcccacctacaacaatcacctctacaagcaaatctccaacagcacatctggaggatcttcaaatgacaacgcctacttcggctacagcaccccctgggggtattttgacttcaaccgcttccactgccacttctcaccacgtgactggcagcgactcatcaacaacaactggggattccggcccaagagactcaacttcaagctcttcaacattcaggtcaaagaggttacggacaacaatggagtcaagaccatcgccaataaccttaccagcacggtccaggtctttacggactcggagtaccagttgccgtacgtcctcggctctgcgcaccagggctgcctccctccgttcccggcggacgtgttcatgattccccagtacggctacctaacactcaacaacggtagtcaggccgtgggacgctcctccttctactgcctggaatatttcccttctcagatgctgagaacgggcaacaactttaccttcagctacacctttgaggacgttcctttccacagcagctacgctcacagccagagtctggaccgtctcatgaatcctctgattgaccagtacctgtactacttgtctcggactcaaacaacaggaggcacggcaaatacgcagactctgggcttcagccaaggtgggcctaatacaatggccaatcaggcaaagaactggctgccaggaccctgttaccgccaacaacgcgtctcaacgacaaccgggcaaaacaacaatagcaactttgcctggactgctgggaccaaataccatctgaatggaagaaattcattggctaatcctggcatcgctatggcaacacacaaagacgacaaggagcgtttttttcccagtaacgggatcctgatttttggcaaacaaaatgctgccagagacaatgcggattacagcgatgtcatgctcaccagcgaggaagaaatcaaaaccactaaccctgtggctacagaggaatacggtatcgtggcagataacttgcagcagcaaaacacggctcctcaaattggaactgtcaacagccagggggccttacccggtatggtctggcagaaccgggacgtgtacctgcagggtcccatctgggcaaagattccacacacggacggacattttcacccctctcccctcatgggtggattcggacttaaacaccctcctccacagattctcatcaagaacaccccggtacctgcgaatcctccgaccaccttcaaccagtcaaagctgaactctttcatcacgcaatacagcacaggacaagtgagtgtggaaattgaatgggagctgcagaaagaaaacagcaagcgctggaatcccgaagtgcagtacacatccaattatgcaaaatctgccaacgttgattttactgtggacaacaatggactttatactgagcctcgccccattggcacccgttaccttacccgtcccctgtaa

SEQ ID NO: 1030 - DNA, 2211 bp, Artificial Sequence
  source: /note="Description of Artificial Sequence: Synthetic polynucleotide"
atggctgccgatggttatcttccagattggctcgaggacaacctctctgagggcattcgcgagtggtgggcgctgaaacctggagccccgaaacccaaagccaaccagcaaaagcaggacgacggccggggtctggtgcttcctggctacaagtacctcggacccttcaacggactcgacaagggggagcccgtcaacgcggcggacgcagcggccctcgagcacgacaaggcctacgaccagcagctcaaggcgggtgacaatccgtacctgcggtataaccacgccgacgccgagtttcaggagcgtctgcaagaagatacgtcttttgggggcaacctcgggcgagcagtcttccaggccaaaaagaggcttcttgaacctcttggtctggttgaggaaggggctaagacggctcctggaaagaaacgtccggtagagcagtcgccacaagagccagactcctcctcgggcattggcaagacaggccagcagcccgctaaaaagagactcaactttgggcagactggcgactcagagtcagtgcccgatcctcaacctctcggagaacctccagcaacccccgctgctgtgggacctactacaatggcttcaggcggtggcgcaccaatggcggacaataacgaaggcgccgatggagtgggtaattcctcgggaaattggcattgcgattccacatggatgggcgacagagtcatcaccaccagcacccgaacctgggccctgcccacctacaacaatcacctctacaagcaaatctccagtgcttcaacgggggccagcaacgacaaccactacttcggctacagcaccccctgggggtattttgatttcaacagattccactgccatttttcaccacgtgactggcagcgactcatcaacaacaactggggattccggcccaagagactcaacttcaagctcttcaacatccaggtcaaggaggtcacgcagaatgaaggcaccaagaccatcgccaataaccttaccagcacgattcaggtctttacggattcggaataccagctcccgtacgtcctcggctctgcgcaccagggctgcctccctccgttcccggcggacgtgttcattattccgcagtacggctacctaacgctcaacaatggtagccaggcagtgggacggtcatccttttactgcctggaatatttcccatcgcagatgctgagaacgggcaacaactttaccttcagctacacctttgaggacgttcctttccacagcagctacgctcacagccagagtctggaccgtctcatgaatcctctgattgaccagtacctgtactacttgtctcggactcaaacaacaggaggcacggcaaatacgcagactctgggcttcagccaaggtgggcctaatacaatggccaatcaggcaaagaactggctgccaggaccctgttaccgccaacaacgcgtctcaacgacaaccgggcaaaacaacaatagcaactttgcctggactgctgggaccaaataccatctgaatggaagaaattcattggctaatcctggcatcgctatggcaacacacaaagacgacaaggagcgtttttttcccagtaacgggatcctgatttttggcaaacaaaatgctgccagagacaatgcggattacagcgatgtcatgctcaccagcgaggaagaaatcaaaaccactaaccctgtggctacagaggaatacggtatcgtggcagataacttgcagcagcaaaacacggctcctcaaattggaactgtcaacagccagggggccttacccggtatggtctggcagaaccgggacgtgtacctgcagggtcccatctgggccaagattcctcacacggacggcaacttccacccgtctccgctgatgggcggctttggcctgaaacatcctccgcctcagatcctgatcaagaacacgccagtacctgcggatcctccgaccaccttcaaccagtcaaagctgaactctttcatcacgcaatacagcaccggacaggtcagcgtggaaattgaatgggagctgcagaaggaaaacagcaagcgctggaaccccgagatccagtacacctccaactactacaaatctacaagtgtggactttgctgttaatacagaaggcgtgtactctgaaccccaccccattggcacccgttacctcacccgtcccctgtaa

SEQ ID NO: 1031 - DNA, 2211 bp, Artificial Sequence
  source: /note="Description of Artificial Sequence: Synthetic polynucleotide"
atggctgccgatggttatcttccagattggctcgaggacaacctctctgagggcattcgcgagtggtgggcgctgaaacctggagccccgaaacccaaagccaaccagcaaaagcaggacgacggccggggtctggtgcttcctggctacaagtacctcggacccttcaacggactcgacaagggggagcccgtcaacgcggcggatgcagcggccctcgagcacgacaaggcctacgaccagcagctcaaggcgggtgacaatccgtacctgcggtataaccacgccgacgccgagtttcaggagcgtctgcaagaagatacgtcttttgggggcaacctcgggcgagcagtcttccaggccaaaaagagggttcttgaaccttttggtctggttgaggaagctgctaagacggctcctggaaagaaacgtccggtagagcagtcgccacaagagccagactcctcctcgggcattggcaagacaggccagcagcccgctaaaaagagactcaattttggtcagactggcgactcagagtcagtgcccgaccctcaacctctcggagaacctccagcaacccccgctgctgtgggacctactacaatggcttcaggcggtggcgcaccaatggcagacaataacgaaggcgccgatggagtgggtaatgcctcaggaaattggcattgcgattccacatggctgggcgacagagtcatcaccaccagcacccgaacctgggccctgcccacctacaacaatcacctctacaagcaaatctccagtgcttcaacgggggccagcaacgacaaccactacttcggctacagcaccccctgggggtattttgactttaacagattccactgccacttttcaccacgtgactggcagcgactcatcaacaacaactggggattccggcccaagagactcaacttcaagctcttcaacatccaggtcaaggaggtcacgcagaatgaaggcaccaagaccatcgccaataacctcaccagcaccattcaggtctttacggattcggaataccagctcccgtacgtcctcggctctgcccaccagggctgcctccctccgttcccggcggacgtgttcatgattccgcagtacggctacctaacgctcaacaatggtagccaggcagtgggacggtcatccttttactgcctggaatatttcccatcgcagatgctgagaacgggcaacaactttaccttcagctacacctttgaggacgttcctttccacagcagctacgctcacagccagagtctggaccgtctcatgaatcctctgattgaccagtacctgtactacttgtctcggactcaaacaacaggaggcacggcaaatacgcagactctgggcttcagccaaggtgggcctaatacaatggccaatcacgcaaagaactggctgccaggaccctgttaccgccaacaacgcgtctcaacgacaaccgggcaaaacaacaatagcaactttgcctggactgctgggaccaaataccatctgaatggaagaaattcattggctaatcctggcatcgctatggcaacacacaaagacgacaaggagcgtttttttcccagtaacgggatcctgatttttggcaaacaaaatgctgccagagacaatgcggattacagcgatgtcatgctcaccagcgaggaagaaatcaaaaccactaaccctgtggctacagaggaatacggtatcgtggcagataacttgcagcagcaaaacacggctcctcaaattggaactgtcaacagccagggggccttacccggtatggtctggcagaaccgggacgtgtacctgcagggtcccatctgggccaagattcctcacacggacggcaacttccacccgtctccgctgatgggcggctttggcctgaaacatcctccgcctcagatcctgatcaagaacacgcctgtacctgcggatcctccgaccaccttcaaccagtcaaagctgaactctttcatcacgcaatacagcaccggacaggtcagcgtggaaattgaatgggagctgcagaaggaaaacagcaagcgctggaaccccgagatccagtacacctccaactactacaaatctacaagtgtggactttgctgttaatacagaaggcgtgtactctgaaccccaccccattggcacccgttacctcacccgtcccctgtaa

SEQ ID NO: 1032 - DNA, 2211 bp, Artificial Sequence
  source: /note="Description of Artificial Sequence: Synthetic polynucleotide"
atggctgccgatggttatcttccagattggctcgaggacaacctctctgagggcattcgcgagtggtgggcgctgaaacctggagccccgaagcccaaagccaaccagcaaaagcaggacgacggccggggtctggtgcttcctggctacaagtacctcggacccttcaacggactcgacaaaggagagcccgtcaacgaggcggacgcggcggccctcgaacacgacaaggcttacgaccagcagctcaaggccggtgacaacccctacctgcggtacaaccacgccgacgccgagttccaggagcggctgcaagaagatacgtcttttgggggcaacctcgggcgagcagtcttccaggccaagaagaggcttcttgaacctcttggtctggttgaggaagcggctaagacggctcctggaaagaagaggcctgtagagcagtctcctcaggaaccggactcctccgcgggtattggcaaatcaggtgcacagcccgctaaaaagagactcaattttggtcagactggcgactcagagtcagtccccgacccacaacctctcggagaacctccagcaacccccgctgctgtgggacctactacaatggcttcaggcggtggcgcaccaatggcagacaataacgaaggcgccgatggagtgggtaatgcctcaggaaattggcattgcgattccacatggctgggcgacagagtcatcaccaccagcacccgaacctgggccctgcccacctataacaaccatctctacaagcaaatctccagtgcttcaacgggggccagtaacgacaaccactacttcggctacagcaccccctgggggtattttgactttaacagattccactgccacttctcaccacgtgactggcagcgactcatcaacaacaactggggattccggcccaagcgactcaacttcaagctcttcaacattcaggtcaaagaggttacggacaacgatggagtcaagaccatcgccaataaccttaccagcaccattcaggtgtttacggactcggaataccagctgccgtacgttctcggctccgcccaccagggctgcctgcctccgttcccggcggacgtgttcatgattccccagtacggctacctaacactcaacaacggtagtcaggccgtgggacgctcctccttctactgcctggaatactttccttcgcagatgctgagaactggcaacaacttccagtttacttacaccttcgaggacgtgcctttccacagcagctacgcccacagccagagcttggaccggctgatgaatcctctgattgaccagtacctgtactacttgtctcggactcaaacaacaggaggcacggcaaatacgcagactctgggcttcagccaaggtgggcctaatacaatggccaatcaggcaaagaactggctgccaggaccctgttaccgccaacaacgcgtctcaacgacaaccgggcaaaacaacaatagcaactttgcctggactgctgggaccaaataccatctgaatggaagaaattcattggctaatcctggcatcgctatggcaacacacaaagacgacaaggagcgtttttttcccagtaacgggatcctgatttttggcaaacaaaatgctgccagagacaatgcggattacagcgatgtcatgctcaccagcgaggaagaaatcaaaaccactaaccctgtggctacagaggaatacggtatcgtggcagataacttgcagcagcaaaacacggctcctcaaattggaactgtcaacagccagggggccttacccggtatggtctggcagaaccgggacgtgtacctgcagggtcccatctgggccaagattcctcacacggacggcaacttccacccgtctccgctgatgggcggctttggcctgaaacatcctccgcctcagatcctgatcaagaacacgcctgtacctgcggatcctccgaccaccttcaaccagtcaaagctgaactctttcatcacgcaatacagcaccggacaggtcagcgtggaaattgaatgggagctgcagaaggaaaacagcaagcgctggaaccccgagatccagtacacctccaactactacaaatctacaagtgtggactttgctgttaatacagaaggcgtgtactctgaaccccaccccattggcacccgttacctcacccgtcccctgtaa

SEQ ID NO: 1033 - DNA, 2211 bp, Artificial Sequence
  source: /note="Description of Artificial Sequence: Synthetic polynucleotide"
atggctgccgatggttatcttccagattggctcgaggacaacctctctgagggcattcgcgagtggtgggcgctgaaacctggagccccgaagcccaaagccaaccagcaaaagcaggacgacggccggggtctggtgcttcctggctacaagtacctcggacccttcaacggactcgacaagggggagcccgtcaacgcggcggatgcagcggccctcgagcacgacaaagcctacgaccagcagctcaaagcgggtgacaatccgtacctgcggtataaccacgccgacgccgagtttcaggagcgtctgcaagaagatacgtcttttgggggcaacctcgggcgagcagtcttccaggccaagaagagggttctcgaacctttgggtctggttgaggaaggggctaagacggctcctggaaagaaaaggccggtagagcagtctcctcaggaaccggactcctccgcgggtattggcaagacaggtgcacagcccgctaaaaagagactcaattttggtcagactggcgactcagagtcagtccccgacccacaacctctcggagaacctccagcaacccccgctgctgtgggacctactacaatggcttcaggcggtggcgcaccaatggcagacaataacgaaggcgccgacggagtgggtagtgcctcgggaaattggcattgcgattccacatggctgggcgacagagtcatcaccaccagcacccgaacctgggccctgcccacctataacaaccatctctacaagcaaatctccagtgcttcaacgggggccagtaacgacaaccactacttcggctacagcaccccctgggggtattttgacttcaacagattccactgccacttctcaccacgtgactggcagcgactcatcaacaacaactggggattccggcccaagcgactcaacttcaagctcttcaacattcaggtcaaagaggttacggacaacaatggagtcaagaccatcgccaataaccttaccagcacgatccaggtctttacggactcggagtaccagctgccgtacgtcctcggctctgcgcaccagggctgcctgcctccgttcccggcggacgtgttcatgattccgcagtacggctacctaacgctcaacaatggtagccaggcagtgggacggtcatccttttactgcctggaatatttcccatcgcagatgctgagaacgggcaacaactttaccttcagctacacctttgaggacgttcctttccacagcagctacgctcacagccagagtctggaccgtctcatgaatcctctgattgaccagtacctgtactacttgtctcggactcaaacaacaggaggcacggcaaatacgcagactctgggcttcagccaaggtgggcctaatacaatggccaatcaggcaaagaactggctgccaggaccctgttaccgccaacaacgcgtctcaacgacaaccgggcaaaacaacaatagcaactttgcctggactgctgggaccaaataccatctgaatggaagaaattcattggctaatcctggcatcgctatggcaacacacaaagacgacaaggagcgtttttttcccagtaacgggatcctgatttttggcaaacaaaatgctgccagagacaatgcggattacagcgatgtcatgctcaccagcgaggaagaaatcaaaaccactaaccctgtggctacagaggaatacggtatcgtggcagataacttgcagcagcaaaacacggctcctcaaattggaactgtcaacagccagggggccttacccggtatggtctggcagaaccgggacgtgtacctgcagggtcccatctgggccaagattcctcacacggacggcaacttccacccgtctccgctgatgggcggctttggcctgaaacatcctccgcctcagatcctgatcaagaacacgcctgtacctgcggatcctccgaccaccttcaaccagtcaaagctgaactctttcatcacgcaatacagcaccggacaggtcagcgtggaaattgaatgggagctgcagaaggaaaacagcaagcgctggaaccccgagatccagtacacctccaactactacaaatctacaagtgtggactttgctgttaatacagaaggcgtgtactctgaaccccaccccattggcacccgttacctcacccgtcccctgtaa

SEQ ID NO: 1034 - DNA, 2211 bp, Artificial Sequence
  source: /note="Description of Artificial Sequence: Synthetic polynucleotide"
atggctgccgatggttatcttccagattggctcgaggacaacctctctgagggcattcgcgagtggtgggacttgaaacctggagccccgaagcccaaagccaaccagcaaaagcaggacgacggccggggtctggtgcttcctggctacaagtacctcggacccttcaacggactcgacaagggggagcccgtcaacgcggcggacgcagcggccctcgagcacgacaaggcctacgaccagcagctcaaagcgggtgacaatccgtacctgcggtataaccacgccgacgccgagtttcaggagcgtctgcaagaagatacgtcttttgggggcaacctcggacgagcagtcttccaggccaaaaagaggcttcttgaacctcttggtctggttgaggaagcggctaagacggctcctggaaagaagaggcctgtagagcagtctcctcaggaaccggactcctccgcgggtattggcaaatcgggtgcacagcccgctaaaaagagactcaatttcggtcagactggcgacacagagtcagtcccagaccctcaaccaatcggagaacctccagcagcgccctctggtgtgggacctaatacaatggctgcaggcggtggcgcaccaatggcagacaataacgaaggtgccgatggagtgggtagttcctcgggaaattggcattgcgattcccaatggctgggggacagagtcatcaccaccagcacccgaacctgggccctgcccacctataacaaccacctctacaagcaaatctccagtgcttcaacgggggccagcaacgacaaccactactttggctacagcaccccttgggggtattttgacttcaacagattccactgccacttttcaccacgtgactggcaaagactcatcaacaacaactggggattccgacccaagagactcaacttcaagctcttcaacatccaggtcaaggaggtcacgcagaatgaaggcaccaagaccatcgccaataacctcaccagcaccatccaggtgtttacggactcggagtaccagctgccgtacgttctcggctctgcccaccagggctgcctgcctccgttcccggcggacgtgttcatgattccccagtacggctacctaacactcaacaacggtagtcaggccgtgggacgctcctccttctactgcctggaatactttccttcgcagatgctgagaaccggcaacaacttccagtttacttacaccttcgaggacgtgcctttccacagcagctacgcgcacagccagagcttggaccggctgatgaatcctctgattgaccagtacctgtactacttgtctcggactcaaacaacaggaggcacggcaaatacgcagactctgggcttcagccaaggtgggcctaatacaatggccaatcacgcaaagaactggctgccaggaccctgttaccgccaacaacgcgtctcaacgacaaccgggcaaaacaacaatagcaactttgcctggactgctgggaccaaataccatctgaatggaagaaattcattggctaatcctggcatcgctatggcaacacacaaagacgacaaggagcgtttttttcccagtaacgggatcctgatttttggcaaacaaaatgctgccagagacaatgcggattacagcgatgtcatgctcaccagcgaggaagaaatcaaaaccactaaccctgtggctacagaggaatacggtatcgtggcagataacttgcagcagcaaaacacggctcctcaaattggaactgtcaacagccagggggccttacccggtatggtctggcagaaccgggacgtgtacctgcagggtcccatctgggccaagattcctcacacggacggcaacttccacccgtctccgctgatgggcggctttggcctgaaacatcctccgcctcagatcctgatcaagaacacgcctgtacctgcggatcctccgaccaccttcaaccagtcaaagctgaactctttcatcacgcaatacagcaccggacaggtcagcgtggaaattgaatgggagctgcagaaggaaaacagcaagcgctggaaccccgagatccagtacacctccaactactacaaatctacaagtgtggactttgctgttaatacagaaggcgtgtactctgaaccccaccccattggcacccgttacctcacccgtcccctgtaa

SEQ ID NO: 1035 - DNA, 2214 bp, Artificial Sequence
  source: /note="Description of Artificial Sequence: Synthetic polynucleotide"
atggctgccgatggttatcttccagattggctcgaggacaaccttagtgaaggaattcgcgagtggtgggcgctgaaacctggagccccgaagcccaaagccaaccagcaaaagcaggacgacggccggggtctggtgcttcctggctacaagtacctcggacccttcaacggactcgacaagggggagcccgtcaacgcggcggacgcagcggccctcgagcacgacaaggcctacgaccagcagctcaaagcgggtgacaatccgtacctgcggtataaccacgccgacgccgagtttcaggagcgtctgcaagaagatacgtcttttgggggcaacctcgggcgagcagtcttccaggccaagaagcgggttctcgaacctctcggtctggttgaggaaggcgctaagacggctcctggaaagaaacgtccggtagagcagtcgccacaagagccagactcctcctcgggcatcggcaagacaggccagcagcccgctaaaaagagactcaatttcggtcagactggcgacacagagtcagtcccagaccctcaaccaatcggagaacctcccgcagccccctcaggtgtgggatctcttacaatggcttcaggtggtggcgcaccagtggcagacaataacgaaggtgccgatggagtgggtagttcctcgggaaattggcattgcgattcccaatggctgggggacagagtcatcaccaccagcaccagaacctgggccttgcccacctacaataaccacctctacaagcaaatctccaacagcacatctggaggatcttcaaatgacaacgcctacttcggctacagcaccccctgggggtattttgactttaacagattccactgccacttttcaccacgtgactggcagcgactcatcaacaacaactggggattccgacccaagagactcaacttcaagctcttcaacatccaggtcaaggaggtcacgcagaacgaaggcaccaagaccatcgccaataacctcaccagcaccatccaggtgtttacggactcggagtaccagctgccgtacgttctcggctccgcccaccagggctgcctgcctccgttcccggcggacgtgttcatgattccccagtacggctacctaacgctcaacaacggtagtcaggccgtgggacgctcctccttctactgcctggaatactttccttcgcagatgctgagaaccggcaacaacttccagtttacttacaccttcgaggacgtgcctttccacagcagctacgcgcacagccagagcttggaccggctgatgaatcctctgattgaccagtacctgtactacttgtctcggactcaaacaacaggaggcacggcaaatacgcagactctgggcttcagccaaggtgggcctaatacaatggccaatcaggcaaagaactggctgccaggaccctgttaccgccaacaacgcgtctcaacgacaaccgggcaaaacaacaatagcaactttgcctggactgctgggaccaaataccatctgaatggaagaaattcattggctaatcctggcatcgctatggcaacacacaaagacgacaaggagcgtttttttcccagtaacgggatcctgatttttggcaaacaaaatgctgccagagacaatgcggattacagcgatgtcatgctcaccagcgaggaagaaatcaaaaccactaaccctgtggctacagaggaatacggtatcgtggcagataacttgcagcagcaaaacacggctcctcaaattggaactgtcaacagccagggggccttacccggtatggtctggcagaaccgggacgtgtacctgcagggtcccatctgggccaagattcctcacacggacggcaacttccacccgtctccgctgatgggcggctttggcctgaaacatcctccgcctcagatcctgatcaagaacacgcctgtacctgcggatcctccgaccaccttcaaccagtcaaagctgaactctttcatcacgcaatacagcaccggacaggtcagcgtggaaattgaatgggagctgcagaaggaaaacagcaagcgctggaaccccgagatccagtacacctccaactactacaaatctacaagtgtggactttgctgttaatacagaaggcgtgtactctgaaccccaccccattggcacccgttacctcacccgtcccctgtaa

SEQ ID NO: 1036 - DNA, 2214 bp, Artificial Sequence
  source: /note="Description of Artificial Sequence: Synthetic polynucleotide"
atggctgccgatggttatcttccagattggctcgaggacaaccttagtgaaggaattcgcgagtggtgggcgctgaaacctggagccccgaagcccaaagccaaccagcaaaagcaggacgacggccggggtctggtgcttcctggctacaagtacctcggacccttcaacggactcgacaagggggagcccgtcaacgcggcggacgcagcggccctcgagcacgacaaggcctacgaccagcagctcaaagcgggtgacaatccgtacctgcggtataaccacgccgacgcggagtttcaggagcgccttaaagaagatacgtcttttgggggcaacctcgggcgagcagtcttccaggccaagaagagggttctcgaaccttttggtctggttgaggaaggtgctaagacggctcctggaaagaaacgtccggtagagcagtcgccacaagagccagactcctcctcgggcatcggcaagacaggccagcagcccgctaaaaagagactcaattttggtcagactggcgactcagagtcagttccagaccctcaacctctcggagaacctccagcagcgccctctggtgtgggacctaatacaatggctgcaggcggtggcgcaccaatggcagacaataacgaaggtgccgatggagtgggtagttcctcgggaaattggcattgcgattcccaatggctggggaacagagtcatcaccaccagcacccgaacctgggccctgcccacctacaacaatcacctctacaagcaaatctccaacagcacatctggaggatcttcaaatgacaacgcctacttcggctacagcaccccctgggggtattttgacttcaacagattccactgccacttctcaccacgtgactggcagcgactcatcaacaacaactggggattccggcccaagagactcaacttcaagctcttcaacattcaggtcaaagaggttacggacaacaatggagtcaagaccatcgccaataaccttaccagcacggtccaggtcttcacggactcggagtaccagttgccgtacgtcctcggctctgcgcaccagggctgcctccctccgttcccggcggacgtgttcatgattccgcaatacggctacctgacgctcaacaacggtagccaagccgtgggacgttcatccttttactgcctggaatatttcccttctcagatgctgagaaccggcaacaacttccagtttacttacaccttcgaggacgtgcctttccacagcagctacgcgcacagccagagcttggaccggctgatgaatcctctgattgaccagtacctgtactacttgtctcggactcaaacaacaggaggcacggcaaatacgcagactctgggcttcagccaaggtgggcctaatacaatggccaatcaggcaaagaactggctgccaggaccctgttaccgccaacaacgcgtctcaacgacaaccgggcaaaacaacaatagcaactttgcctggactgctgggaccaaataccatctgaatggaagaaattcattggctaatcctggcatcgctatggcaacacacaaagacgacaaggagcgtttttttcccagtaacgggatcctgatttttggcaaacaaaatgctgccagagacaatgcggattacagcgatgtcatgctcaccagcgaggaagaaatcaaaaccactaaccctgtggctacagaggaatacggtatcgtggcagataacttgcagcagcaaaacacggctcctcaaattggaactgtcaacagccagggggccttacccggtatggtctggcagaaccgggacgtgtacctgcagggtcccatctgggccaagattcctcacacggacggcaacttccacccgtctccgctgatgggcggctttggcctgaaacatcctccgcctcagatcctgatcaagaacacgcctgtacctgcggatcctccgaccaccttcaaccagtcaaagctgaactctttcatcacgcaatacagcaccggacaggtcagcgtggaaattgaatgggagctgcagaaggaaaacagcaagcgctggaaccccgagatccagtacacctccaactactacaaatctacaagtgtggactttgctgttaatacagaaggcgtgtactctgaaccccaccccattggcacccgttacctcacccgtcccctgtaa

SEQ ID NO: 1037 - DNA, 2211 bp, Artificial Sequence
  source: /note="Description of Artificial Sequence: Synthetic polynucleotide"
atggctgccgatggttatcttccagattggctcgaggacaacctctctgagggcattcgcgagtggtgggacttgaaacctggagccccgaagcccaaagccaaccagcaaaagcaggacgacggccggggtctggtgcttcctggctacaagtacctcggacccttcaacggactcgacaggggggagcccgtcaacgcggcggacgcagcggccctcgagcacgacaaggcctacgaccagcagctcaaagcgggtgacaatccgtacctgcggtataaccacgccgacgccgagtttcaggagcgtctgcaagaagatacgtcttttgggggcaacctcgggcgagcagtcttccaggccaagaagcgggttctcgaacctctcggtctggttgaggaaggcgctaagacggctcctggaaagaaacgtccggtagagcagtcgccacaagagccagactcctcctcgggcatcggcaagacaggccagcagcccgctaaaaagagactcaattttggtcagactggcgactcagagtcagtccccgacccacaacctctcggagaacctccagcaacccccgctgctgtgggacctactacaatggcttcaggcggtggcgcaccaatggcagacaataacgaaggcgccgacggagtgggtaatgcctcaggaaattggcattgcgattccacatggctgggcgacagagtcatcaccaccagcacccgaacctgggccttgcccacctataacaaccacctctacaagcaaatctccagtgcttcaacgggggccagcaacgacaaccactacttcggctacagcaccccctgggggtattttgacttcaacagattccactgccacttctcaccacgtgactggcagcgactcatcaacaacaactggggattccggcctaagcgactcaacttcaagctcttcaacattcaggtcaaagaggttacggacaacaatggagtcaagaccatcgccaataacctcaccagcaccatccaggtgtttacggactcggagtaccagctgccgtacgttctcggctctgcccaccagggctgcctgcctccgttcccggcggacgtgttcatgattccccagtacggctacctaacactcaacaacggtagtcaggccgtgggacgctcctccttctactgcctggaatactttccttcgcagatgctgagaaccggcaacaacttccagtttacttacaccttcgaggacgtgcctttccacagcagctacgcccacagccagagcttggaccggctgatgaatcctctgattgaccagtacctgtactacttgtctcggactcaaacaacaggaggcacggcaaatacgcagactctgggcttcagccaaggtgggcctaatacaatggccaatcaggcaaagaactggctgccaggaccctgttaccgccaacaacgcgtctcaacgacaaccgggcaaaacaacaatagcaactttgcctggactgctgggaccaaataccatctgaatggaagaaattcattggctaatcctggcatcgctatggcaacacacaaagacgacaaggagcgtttttttcccagtaacgggatcctgatttttggcaaacaaaatgctgccagagacaatgcggattacagcgatgtcatgctcaccagcgaggaagaaatcaaaaccactaaccctgtggctacagaggaatacggtatcgtggcagataacttgcagcagcaaaacacggctcctcaaattggaactgtcaacagccagggggccttacccggtatggtctggcagaaccgggacgtgtacctgcagggtcccatctgggccaagattcctcacacggacggcaacttccacccgtctccgctgatgggcggctttggcctgaaacatcctccgcctcagatcctgatcaagaacacgcctgtacctgcggatcctccgaccaccttcaaccagtcaaagctgaactctttcatcacgcaatacagcaccggacaggtcagcgtggaaattgaatgggagctgcagaaggaaaacagcaagcgctggaaccccgagatccagtacacctccaactactacaaatctacaagtgtggactttgctgttaatacagaaggcgtgtactctgaaccccaccccattggcacccgttacctcacccgtcccctgtaa

SEQ ID NO: 1038 - DNA, 2211 bp, Artificial Sequence
  source: /note="Description of Artificial Sequence: Synthetic polynucleotide"
atggctgccgatggttatcttccagattggctcgaggacaacctctctgagggcattcgcgagtggtgggacttgaaacctggagccccgaagcccaaagccaaccagcaaaagcaggacgacggccggggtctggtgcttcctggctacaagtacctcggacccttcaacggactcgacaagggggagcccgtcaacgcggcggacgcagcggccctcgagcacgacaaggcctacgaccagcagctcaaagcgggtgacaatccgtacctgcggtataaccacgccgacgccgagtttcaggagcgtctgcaagaagatacgtcttttgggggcaacctcgggcgagcagtcttccaggccaagaagcgggttctcgaacctctcggtctggttgaggaaggcgctaagacggctcctggaaagaaacgtccggtagagcagtcgccacaagagccagactcctcctcgggcatcggcaagaaaggccaacagcccgccagaaaaagactcaattttggtcagactggcgactcagagtcagttccagaccctcaacctctcggagaacctcccgcagccccctcaggtgtgggatctcttacaatggcttcaggcggtggcgcaccaatggcagacaataacgaaggcgccgacggagtgggtaatgcctcaggaaattggcattgcgattccacatggctgggcgacagagtcatcaccaccagcacccgaacatgggccttgcccacttacaacaaccatctctacaagcaaatctccagtgcttcaacgggggccagcaacgacaaccactacttcggctacagcaccccctgggggtattttgatttcaacagattccactgccacttttcaccacgtgactggcaaagactcatcaacaacaactggggattccgacccaagagactcaacttcaagctctttaacattcaagtcaaagaggtcacgcagaatgaaggcaccaagaccatcgccaataaccttaccagcacggtccaggtcttcacggactcagactatcagctcccgtacgttctcggctccgcccaccagggctgcctgcctccgttcccggcggacgtgttcatgattccccagtacggctacctaacactcaacaacggtagtcaggccgtgggacgctcctccttctactgcctggaatactttccttcgcagatgctgagaaccggcaacaacttccagtttacttacacctttgaggacgttcctttccacagcagctacgctcacagccagagtctggaccgtctcatgaatcctctgattgaccagtacctgtactacttgtctcggactcaaacaacaggaggcacggcaaatacgcagactctgggcttcagccaaggtgggcctaatacaatggccaatcaggcaaagaactggctgccaggaccctgttaccgccaacaacgcgtctcaacgacaaccgggcaaaacaacaatagcaactttgcctggactgctggaaccaaataccatctgaatggaagaaattcattgtctaatcctggcatcgctatggcgacacacaaagacgacaaggagcgtttttttcccagtaacgggatcctgatttttggcaaacaaaatgctgccagagacaatgcggattacagcgatgtcatgctcaccagcgaggaagaaatcaaaaccactaaccctgtggctacagaggaatacggtatcgtggcagataacttgcagcagcaaaacacggctcctcaaattggaactgtcaacagccagggggccttacccggtatggtctggcagaaccgggacatgtacctgcagggtcccatctgggccaagattcctcacacggacggcaacttccacccgtctccgctgatgggcggctttggcctgaaacatcctccgcctcagatcctgatcaagaacacgcctgtacctgcggatcctccgaccaccttcaaccagtcaaagctgaactctttcatcacgcaatacagcaccggacaggtcagcgtggaaattgaatgggagctgcagaaggaaaacagcaagcgctggaaccccgagatccagtacacctccaactactacaaatctacaagtgtggactttgctgttaatacagaaggcgtgtactctgaaccccaccccattggcacccgttacctcacccgtcccctgtaa

SEQ ID NO: 1039 - DNA, 2211 bp, Artificial Sequence
  source: /note="Description of Artificial Sequence: Synthetic polynucleotide"
atggctgccgatggttatcttccagattggctcgaggacaacctctctgagggcattcgcgagtggtgggcgctgaaacctggagccccgaagcccaaagccaaccagcaaaagcaggacgacggccggggtctggtgcttcctggctacaagtacctcggacccttcaacggactcgacaagggggagcccgtcaacgcggcggatgcagcggccctcgagcacgacaaggcctacgaccagcagctcaaagcgggtgacaatccgtacctgcggtataaccacgccgacgccgagtttcaggagcgtctgcaggaagatacgtcttttgggggcaacctcgggcgagcagtcttccaggccaagaagagggttctcgaaccttttggtctggttgaggaaggcgctaagacggctcctggaaagaaacgtccggtagagcagtcgccacaagagccagactcctcctcgggcatcggcaagacaggccagcagcccgctaaaaagagactcaattttggtcagactggcggctcagagtcagtccccgacccacaacctctcggagaacctccagcaacccccgctgctgtgggacctactacaatggctgcaggcggtggcgcaccaatggcagacaataacgaaggcgccgacggagtgggtagttcctcgggaaattggcattgcgattccacatggctgggcgacagagtcatcaccaccagcaccagaacctgggccttgcccacctataacaaccacctctacaagcaaatctccagtgcttcaacgggggccagcaacgacaaccactacttcggctacagcaccccctgggggtattttgatttcaacagattccactgccatttctcaccacgtgactggcagcgactcatcaacaacaactggggattccggcccaagagactcaacttcaaactcttcaacattcaggtcaaagaggttacggacaacaatggagtcaagaccatcgccaataaccttaccagcacggtccaggtgtttacggactcggagtaccagctgccgtacgttctcggctctgcccaccagggctgcctccctccgttcccggcggacgtgttcatgattccgcagtacggctacctaacgctcaacaatggcagccaggcagtgggacggtcatccttttactgcctggaatatttcccttctcagatgctgagaacgggcaacaactttaccttcagctacacctttgaggaagtgcctttccacagcagctacgcgcacagccagagcctggaccggctgatgaatcctctgattgaccagtacctgtactacttgtctcggactcaaacaacaggaggcacggcaaatacgcagactctgggcttcagccaaggtgggcctaatacaatggccaatcaggcaaagaactggctgccaggaccctgttaccgccaacaacgcgtctcaacgacaaccgggcaaaacaacaatagcaactttgcctggactgctgggaccaaataccatctgaatggaagaaattcattggctaatcctggcatcgctatggcctcacacaaagacgacaaggagcgtttttttcccagtaacgggatcctgatttttggcaaacaaaatgctgccagagacaatgcggattacagcgatgtcatgctcaccagcgaggaagaaatcaaaaccactaaccctgtggctacagaggaatacggtatcgtggcagataacttgcagcagcaaaacacggctcctcaaattggaactgtcaacagccagggggccttacccggtatggtctggcagaaccgggacgtgtacctgcagggtcccatctgggccaagattcctcacacggacggcaacttccacccgtctccgctgatgggcggctttggcctgaaacatcctccgcctcagatcctgatcaagaacacgcctgtacctgcggatcctccgaccaccttcaaccagtcaaagctgaactctttcatcacgcaatacagcaccggacaggtcagcgtggaaattgaatgggagctgcagaaggaaaacagcaagcgctggaaccccgagatccagtacacctccaactactacaaatctacaagtgtggactttgctgttaatacagaaggcgtgtactctgaaccccaccccattggcacccgttacctcacccgtcccctgtaa

SEQ ID NO: 1040 - protein, 736 aa, Artificial Sequence
  source: /note="Description of Artificial Sequence: Synthetic polypeptide"
MAADGYLPDWLEDTLSEGIRQWWKLKPGPPPPKPAERHKDDSRGLVLPGYKYLGPFNGLDKGEPVNEADAAALEHDKAYDQQLKAGDNPYLKYNHADAEFQERLKEDTSFGGNLGRAVFQAKKRVLEPLGLVEEGAKTAPGKKRPVEQSPQEPDSSSGIGKTGQQPAKKRLNFGQTGDSESVPDPQPLGEPPATPAAVGPTTMASGGGAPMADNNEGADGVGSSSGNWHCDSQWLGDRVITTSTRTWALPTYNNHLYKQISSASTGASNDNHYFGYSTPWGYFDFNRFHCHFSPRDWQRLINNNWGFRPKRLNFKLFNIQVKEVTQNEGTKTIANNLTSTIQVFTDSEYQLPYVLGSAHQGCLPPFPADVFMIPQYGYLTLNNGSQAVGRSSFYCLEYFPSQMLRTGNNFQFTYTFEDVPFHSSYAHSQSLDRLMNPLIDQYLYYLSRTQTTGGTANTQTLGFSQGGPNTMANQAKNWLPGPCYRQQRVSTTTGQNNNSNFAWTAGTKYHLNGRNSLANPGIAMATHKDDKERFFPSNGILIFGKQNAARDNADYSDVMLTSEEEIKTTNPVATEEYGIVADNLQQQNTAPQIGTVNSQGALPGMVWQNRDVYLQGPIWAKIPHTDGNFHPSPLMGGFGLKHPPPQILIKNTPVPADPPTTFNQSKLNSFITQYSTGQVSVEIEWELQKENSKRWNPEIQYTSNYYKSTSVDFAVNTEGVYSEPHPIGTRYLTRPL

SEQ ID NO: 1041 - protein, 736 aa, Artificial Sequence
  source: /note="Description of Artificial Sequence: Synthetic polypeptide"
MAADGYLPDWLEDNLSEGIREWWALKPGAPKPKANQQKQDDGRGLVLPGYKYLGPFNGLDKGEPVNAADAAALEHDKAYDQQLKAGDNPYLKYNHADAEFQERLKEDTSFGGNLGRAVFQAKKRLLEPLGLVEEAAKTAPGKKRPVEQSPQEPDSSAGIGKSGAQPAKKRLNFGQTGDSESVPDPQPLGEPPATPAAVGPTTMASGGGAPMADNNEGADGVGNASGNWHCDSTWLGDRVITTSTRTWALPTYNNHLYKQISSASTGASNDNHYFGYSTPWGYFDFNRFHCHFSPRDWQRLINNNWGFRPKRLNFKLFNIQVKEVTQNEGTKTIANNLTSTIQVFTDSEYQLPYVLGSAHQGCLPPFPADVFMIPQYGYLTLNNGSQAVGRSSFYCLEYFPSQMLRTGNNFQFTYTFEDVPFHSSYAHSQSLDRLMNPLIDQYLYYLSRTQTTGGTANTQTLGFSQGGPNTMANQAKNWLPGPCYRQQRVSTTTGQNNNSNFAWTAGTKYHLNGRNSLANPGIAMATHKDDKERFFPSNGILIFGKQNAARDNADYSDVMLTSEEEIKATNPVATEEYGIVADNLQQQNTAPQIGTVNSQGALPGMVWQNRDVYLQGPIWAKIPHTDGNFHPSPLMGGFGLKHPPPQILIKNTPVPADPPTTFNQSKLNSFITQYSTGQVSVEIEWELQKENSKRWNPEIQYTSNYYKSTSVDFAVNTEGVYSEPHPIGTRYLTRPL

SEQ ID NO: 1042 - protein, 737 aa, Artificial Sequence
  source: /note="Description of Artificial Sequence: Synthetic polypeptide"
MAADGYLPDWLEDNLSEGIREWWDLKPGAPKPKANQQKQDDGRGLVLPGYKYLGPFNGLDKGEPVNAADAAALEHDKAYDQQLKAGDNPYLRYNHADAEFQERLQEDTSFGGNLGRAVFQAKKRVLEPLGLVEEGANTAPGKKRPVEQSPQEPDSSAGIGKSGAQPAKKRLNFGQTGDTESVPDPQPIGEPPAAPSGVGSLTMASGGGAPVADNNEGADGVGSSSGNWHCDSQWLGDRVITTSTRTWALPTYNNHLYKQISNSTSGGSSNDNAYFGYSTPWGYFDFNRFHCHFSPRDWQRLINNNWGFRPKRLNFKLFNIQVKEVTDNNGVKTIANNLTSTIQVFTDSEYQLPYVLGSAHQGCLPPFPADVFMIPQYGYLTLNNGSQAVGRSSFYCLEYFPSQMLRTGNNFQFTYTFEDVPFHSSYAHSQSLDRLMNPLIDQYLYYLSRTQTTGGTANTQTLGFSQGGPNTMANQAKNWLPGPCYRQQRVSTTTGQNNNSNFAWTAGTKYHLNGRNSLANPGIAMASHKDDKERFFPSNGILIFGKQNAARDNADYSDVMLTSEEEIKTTNPVATEEYGIVADNLQQQNTAPQIGTVNSQGALPGMVWQNRDVYLQGPIWAKIPHTDGNFHPSPLMGGFGLKHPPPQILIKNTPVPADPPTTFNQSKLNSFITQYSTGQVSVEIEWELQKENSKRWNPEIQYTTNYYKSTSVDFAVNTEGVYSEPHPIGTRYLTRPL

SEQ ID NO: 1043 - protein, 736 aa, Artificial Sequence
  source: /note="Description of Artificial Sequence: Synthetic polypeptide"
MAADGYLPDWLEDNLSEGIREWWALKPGAPKPKANQQKQDDGRGLVLPGYKYLGPFNGLDKGEPVNEADAAALEHDKAYDQQLKAGDNPYLRYNHADAEFQERLQEDTSFGGNLGRAVFQAKKRVLEPLGLVEEGAKTAPGKKRPVEQSPQEPDSSSGIGKTGQQPAKKRLNFGQTGDSESVPDPQPLGEPPATPAAVGPTTMASGGGAPMADNNEGADGVGNASGNWHCDSTWLGDRVITTSTRTWALPTYNNHLYKQISSASTGASNDNHYFGYSTPWGYFDFNRFHCHFSPRDWQRLINNNWGFRPKRLNFKLFNIQVKEVTQNEGTKTIANNLTSTIQVFTDSEYQLPYVLGSAHQGCLPPFPADVFMIPQYGYLTLNNGSQAVGRSSFYCLEYFPSQMLRTGNNFQFTYTFEDVPFHSSYAHSQSLDRLMNPLIDQYLYYLSRTQTTGGTANTQTLGFSQGGPNTMANQAKNWLPGPCYRQQRVSTTTGQNNNSNFAWTAGTKYHLNGRNSLANPGIAMATHKDDKERFFPSNGILIFGKQNAARDNADYSDVMLTSEEEIKTTNPVATEEYGIVADNLQQQNTAPQIGTVNSQGALPGMVWQNRDVYLQGPIWAKIPHTDGNFHPSPLMGGFGLKHPPPQILIKNTPVPADPPTTFNQSKLNSFITQYSTGQVSVEIEWELQKENSKRWNPEIQYTSNYYKSTSVDFAVNTEGVYSEPHPIGTRYLTRPL

SEQ ID NO: 1044 - protein, 736 aa, Artificial Sequence
  source: /note="Description of Artificial Sequence: Synthetic polypeptide"
MAADGYLPDWLEDNLSEGIREWWALKPGAPKPKANQQKQDDGRGLVLPGYKYLGPFNGLDKGEPVNEADAAALEHDKAYDQQLKAGDNPYLRYNHADAEFQERLQEDTSFGGNLGRAVFQAKKRVLEPFGLVEEGAKTAPGKKRPVEQSPQEPDSSSGIGKTGQQPAKKRLNFGQTGDSESVPDPQPLGEPPATPAAVGPTTMASGGGAPMADNNEGADGVGNASGNWHCDSQWLGDRVITTSTRTWALPTYNNHLYKQISSASTGASNDNHYFGYSTPWGYFDFNRFHCHFSPRDWQRLINNNWGFRPKRLNFKLFNIQVKEVTDNNGVKTIANNLTSTVQVFSDSEYQLPYVLGSAHQGCLPPFPADVFMIPQYGYLTLNNGSQAVGRSSFYCLEYFPSQMLRTGNNFQFTYTFEDVPFHSSYAHSQSLDRLMNPLIDQYLYYLSRTQTTGGTANTQTLGFSQGGPNTMANQAKNWLPGPCYRQQRVSTTTGQNNNSNFAWTAGTKYHLNGRNSLANPGIAMATHKDDKERFFPSNGILIFGKQNAARDNADYSDVMLTSEEEIKTTNPVATEEYGIVADNLQQQNTAPQIGTVNSQGALPGMVWQNRDVYLQGPIWAKIPHTDGNFHPSPLMGGFGLKHPPPQILIKNTPVPADPPTTFNQSKLNSFITQYSTGQVSVEIEWELQKENSKRWNPEIQYTSNYYKSTSVDFAVNTEGVYSEPHPIGTRYLTRPL

SEQ ID NO: 1045 - protein, 736 aa, Artificial Sequence
  source: /note="Description of Artificial Sequence: Synthetic polypeptide"
MAADGYLPDWLEDTLSEGIRQWWKLKPGPPPPKPAERHKDDSRGLVLPGYKYLGPFNGLDKGEPVNEADAAALEHDKAYDRQLDSGDNPYLKYNHADAEFQERLKEDTSFGGNLGRAVFQAKKRVLEPFGLVEEGAKTAPGKKRPVEQSPQEPDSSSGIGKTGQQPAKKRLNFGQTGDSESVPDPQPLGEPPATPAAVGPTTMASGGGAPMADNNEGADGVGNASGNWHCDSTWLGDRVITTSTRTWALPTYNNHLYKQISSASTGASNDNHYFGYSTPWGYFDFNRFHCHFSPRDWQRLINNNWGFRPKRLNFKLFNIQVKEVTDNNGVKTIANNLTSTVQVFTDSDYQLPYVLGSAHEGCLPPFPADVFMIPQYGYLTLNNGSQAVGRSSFYCLEYFPSQMLRTGNNFQFTYTFEDVPFHSSYAHSQSLDRLMNPLIDQYLYYLSRTQTTGGTANTQTLGFSQGGPNTMANQAKNWLPGPCYRQQRVSTTTGQNNNSNFAWTAGTKYHLNGRNSLANPGIAMATHKDDKERFFPSNGILIFGKQNAARDNADYSDVMLTSEEEIKTTNPVATEEYGIVADNLQQQNTAPQIGTVNSQGALPGMVWQNRDVYLQGPIWAKIPHTDGNFHPSPLMGGFGLKHPPPQILIKNTPVPADPPTTFNQSKLNSFITQYSTGQVSVEIEWELQKENSKRWNPEIQYTSNYYKSTSVDFAVNTEGVYSEPHPIGTRYLTRNL

SEQ ID NO: 1046 - protein, 738 aa, Artificial Sequence
  source: /note="Description of Artificial Sequence: Synthetic polypeptide"
MAADGYLPDWLEDNLSEGIREWWDLKPGAPKPKANQQKQDDGRGLVLPGYKYLGPFNGLDKGEPVNAADAAALEHDKAYDQQLQAGDNPYLRYNHADAEFQERLQEDTSFGGNLGRAVFQAKKRVLEPLGLVEEGAKTAPGKKRPVEPSPQRSPDSSTGIGKKGQQPARKRLNFGQTGDSESVPDPQPLGEPPAAPSGVGPNTMAAGGGAPMADNNEGADGVGSSSGNWHCDSQWLGDRVITTSTRTWALPTYNNHLYKQISNSTSGGSSNDNAYFGYSTPWGYFDFNRFHCHFSPRDWQRLINNNWGFRPKRLSFKLFNIQVKEVTQNEGTKTIANNLTSTIQVFTDSEYQLPYVLGSAHQGCLPPFPADVFMIPQYGYLTLNNGSQAVGRSSFYCLEYFPSQMLRTGNNFTFSYTFEDVPFHSSYAHSQSLDRLMNPLIDQYLYYLSRTQTTGGTANTQTLGFSQGGPNTMANQAKNWLPGPCYRQQRVSTTTGQNNNSNFAWTAGTKYHLNGRNSLANPGIAMATHKDDKERFFPSNGILIFGKQNAARDNADYSDVMLTSEEEIKTTNPVATEEYGIVADNLQQQNTAPQIGTVNSQGALPGMVWQNRDVYLQGPIWAKIPHTDGNFHPSPLMGGFGLKHPPPQILIKNTPVPADPPTTFNQSKLNSFITQYSTGQVSVEIEWELQKENSKRWNPEIQYTSNYYKSTSVDFAVNTEGVYSEPHPIGTRYLTRPL

SEQ ID NO: 1047 - protein, 737 aa, Artificial Sequence
  source: /note="Description of Artificial Sequence: Synthetic polypeptide"
MAADGYLPDWLEDNLSEGIREWWDLKPGAPKPKANQQKQDDGRGLVLPGYKYLGPFNGLDKGEPVNAADAAALEHDKAYDQQLKAGDNPYLRYNHADAEFQERLQEDTSFGGNLGRAVFQAKKRVLEPFGLVEEGAKTAPGKKRPVEQSPQEPDSSSGIGKTGQQPAKKRLNFGQTGDSESVPDPQPLGEPPATPAAVGPTTMASGGGAPMQDNNEGADGVGSSSGNWHCDSTWLGDRVITTSTRTWALPTYNNHLYKQISNGTSGGATNDNTYFGYSTPWGYFDFNRFHCHFSPRDWQRLINNNWGFRPKRLNFKLFNIQVKEVTQNEGTKTIANNLTSTIQVFTDSEYQLPYVLGSAHQGCLPPFPADVFMIPQYGYLTLNNGSQAVGRSSFYCLEYFPSQMLRTGNNFTFSYTFEDVPFHSSYAHSQSLDRLMNPLIDQYLYYLSRTQTTGGTANTQTLGFSQGGPNTMANQAKNWLPGPCYRQQRVSTTTGQNNNSNFAWTAGTKYHLNGRNSLANPGIAMATHKDDKERFFPSNGILIFGKQNAARDNADYSDVMLTSEEEIKTTNPVATEEYGIVADNLQQQNTAPQIGTVNSQGALPGMVWQNRDVYLQGPIWAKIPHTDGNFHPSPLMGGFGLKHPPPQILIKNTPVPADPPTTFNQSKLNSFITQYSTGQVSVEIEWELQKENSKRWNPEIQYTSNYYKSTSVDFAVNTEGVYSEPHPIGTRYLTRPL

SEQ ID NO: 1048 - protein, 736 aa, Artificial Sequence
  source: /note="Description of Artificial Sequence: Synthetic polypeptide"
MAADGYLPDWLEDNLSEGIREWWALKPGAPKPKANQQKQDDGRGLVLPGYKYLGPFNGLDKGEPVNAADAAALEHDKAYDQQLKAGDNPYLRYNHADAEFQERLQEDTSFGGNLGRAVFQAKKRVLEPLGLVEEGAKTAPGKKRPVEQSPQEPDSSSGIGKTGQQPAKKRLNFGQTGDSESVPDPQPLGEPPATPAAVGPTTMASGGGAPMADNNEGADGVGSSSGNWHCDSTWLGDRVITTSTRTWALPTYNNHLYKQISSASTGASNDNHYFGYSTPWGYFDFNRFHCHFSPRDWQRLINNNWGFRPKRLNFKLFNIQVKEVTDNNGVKTIANNLTSTVQVFTDSDYQLPYVLGSAHEGCLPPFPADVFMIPQYGYLTLNNGSQAVGRSSFYCLEYFPSQMLRTGNNFTFSYTFEDVPFHSSYAHSQSLDRLMNPLIDQYLYYLSRTQTTGGTANTQTLGFSQGGPNTMANQAKNWLPGPCYRQQRVSTTTGQNNNSNFAWTAGTKYHLNGRNSLANPGIAMATHKDDKERFFPSNGILIFGKQNAARDNADYSDVMLTSEEEIKTTNPVATEEYGIVADNLQQQNTAPQIGTVNSQGALPGMVWQNRDVYLQGPIWAKIPHTDGNFHPSPLMGGFGLKHPPPQILIKNTPVPADPPTTFNQSKLNSFITQYSTGQVSVEIEWELQKENSKRWNPEIQYTSNYYKSTSVDFAVNTEGVYSEPHPIGTRYLTRPL

SEQ ID NO: 1049 - protein, 737 aa, Artificial Sequence
  source: /note="Description of Artificial Sequence: Synthetic polypeptide"
MAADGYLPDWLEDNLSEGIREWWDLKPGAPKPKANQQKQDDGRGLVLPGYKYLGPFNGLDKGEPVNAADAAALEHDKAYDQQLKAGDNPYLRYNHADAEFQERLQEDTSFGGNLGRAVFQAKKRVLEPLGLVEEGAKTAPGKKRPVEPSPQRSPDSSTGIGKKGQQPARKRLNFGQTGDSESVPDPQPLGEPPATPAAVGPTTMASGGGAPMADNNEGADGVGNASGNWHCDSTWLGDRVITTSTRTWALPTYNNHLYKQISSASTGASNDNHYFGYSTPWGYFDFNRFHCHFSPRDWQRLINNNLGSRPKRLNFKLFIIQVKEVTTNDGVTTIANNLTSTVQVFSDSEYQLPYVLGSAHQGCLPPFPADVFMIPQYGYLTLNNGSQAVGRSSFYCLEYFPSQMLRTGNNFTFSYTFEDVPFHSSYAHSQSLDRLMNPLIDQYLYYLNRTQNQSGSAQNKDLLFSRGSPAGMSVQPKNWLPGPCYRQQRVSKTKTDNNNSNFTWTGASKYNLNGRESIINPGTAMASHKDDKDKFFPMSGVMIFGKESAGASNTALDNVMITDEEEIKATNPVATERFGTVAVNLQSSSTDPATGDVHVMGALPGMVWQDRDVYLQGPIWAKIPHTDGHFHPSPLMGGFGLKHPPPQILIKNTPVPANPPAEFSATKFASFITQYSTGQVSVEIEWELQKENSKRWNPEVQYTSNYAKSANVDFTVDNNGLYTEPRPIGTRYLTRPL

SEQ ID NO: 1050 - protein, 736 aa, Artificial Sequence
  source: /note="Description of Artificial Sequence: Synthetic polypeptide"
MAADGYLPDWLEDNLSEGIREWWALKPGAPKPKANQQKQDDGRGLVLPGYKYLGPFNGLDKGEPVNAADAAALEHDKAYDQQLKAGDNPYLRYNHADAEFQERLQEDTSFGGNLGRAVFQAKKRLLEPLGLVEEAAKTAPGKKRPVEQSPQEPDSSSGIGKTGQQPAKKRLNFGQTGDSESVPDPQPIGEPPATPAAVGPTTMASGGGAPMADNNEGADGVGNSSGNWHCDSTWLGDRVITTSTRTWALPTYNNHLYKQISSASTGASNDNHYFGYSTPWGYFDFNRFHCHFSPRDWQRLINNNWGFRPKRLNFKLFNIQVKEVTQNEGTKTIANNLTSTIQVFTDSEYQLPYVLGSAHQGCLPPFPADVFMIPQYGYLTLNNGSQAVGRSSFYCLEYFPSQMLRTGNNFTFSYTFEDVPFHSSYAHSQSLDRLMNPLIDQYLYYLSRTQTTGGTANTQTLGFSQGGPNTMANQAKNWLPGPCYRQQRVSTTTGQNNNSNFAWTAGTKYHLNGRNSLANPGIAMATHKDDKERFFPSNGILIFGKQNAARDNADYSDVMLTSEEEIKTTNPVATEEYGIVADNLQQQNTAPQIGTVNSQGALPGMVWQNRDVYLQGPIWAKIPHTDGNFHPSPLMGGFGLKHPPPQILIKNTPVPADPPTTFNQSKLNSFITQYSTGQVSVEIEWELQKENSKRWNPEIQYTSNYYKSTSVDFAVNTEGVYSDPHPIGTRYLTRPL

SEQ ID NO: 1051 - protein, 736 aa, Artificial Sequence
  source: /note="Description of Artificial Sequence: Synthetic polypeptide"
MAADGYLPDWLEDNLSEGIREWWALKPGAPKPKANQQEQDDGRGLVLPGYKYLGPFNGLDKGEPVNAADAAALEHDKAYDQQLKAGDNPYLRYNHADAEFQERLQEDTSFGGNLGRAVFQAKKRVLEPFGLVEEGAKTAPGKKRPVEQSPQEPDSSSGIGKTGQQPAKKRLNFGQTGDSESVPDPQPLGEPPAAPSGVGPNTMAAGGGAPMADNNEGADGVGSSSGNWHCDSTWLGDRVITTSTRTWALPTYNNHLYKQISSASTGASNDNHYFGYSTPWGYFDFNRFHCHFSPRDWQRLINNNWGFRPKRLNFKLFNIQVKEVTQNEGTKTIANNLTSTIQVFTDSEYQLPYVLGSAHQGCLPPFPADVFMIPQYGYLTLNNGSQAVGRSSFFCLEYFPSQMLRTGNNFTFSYTFEDVPFHSSYAHSQSLDRLMNPLIDQYLYYLSRTQTTGGTANTQTLGFSQGGPNTMANQAKNWLPGPCYRQQRVSTTTGQNNNSNFAWTAGTKYHLNGRNSLANPGIAMATHKDDKERFFPSNGILIFGKQNAARDNADYSDVMLTSEEEIKTTNPVATEEYGIVADNLQQQNTAPQIGTVNSQGALPGMVWQNRDVYLQGPIWAKIPHTDGNFHPSPLMGGFGLKHPPPQILIKNTPVPADPPTTFNQSKLNSFITQYSTGQVSVEIEWELQKENSKRWNPEIQYTSNYYKSTSVDFAVNTEGVYSEPHPIGTRYLTRPL

SEQ ID NO: 1052 - protein, 736 aa, Artificial Sequence
  source: /note="Description of Artificial Sequence: Synthetic polypeptide"
MAADGYLPDWLEDNLSEGIREWWDLKPGAPKPKANQQKQDDGRGLVLPGYKYLGPFNGLDKGEPVNAADAAALEHDKAYDQQLKAGDNPYLRYNHADAEFQERLQEDTSFGGNLGRAVFQAKKRVLEPLGLVEEGAKTAPGKKRPVEQSPQEPDSSSGIGKTGQQPAKKRLNFGQTGDSESVPDPQPLGEPPATPAAVGPTTMASGGGAPMADNNEGADGVGNASGNWHCDSTWLGDRVITTSTRTWALPTYNNHLYKQISSASTGASNDNHYFGYSTPWGYFDFNRFHCHFSPRDWQRLINNNWGFRPKRLNFKLFNIQVKEVTTNDGVTTIANNLTSTVQVFSDSEYQLPYVLGSAHQGCLPPFPADVFMIPQYGYLTLNNGSQAVGRSSFYCLEYFPSQMLRTGNNFTFSYTFEDVPFHSSYAHSQSLDRLMNPLIDQYLYYLNRTQNQSGSAQNKDLLFSRGSPAGMSVQPKNWLPGPCYRQQRVSKTKTDNNNSNFTWTGASKYNLNGRESIINPGTAMASHKDDKDKFFPMSGVMIFGKESAGASNTALDNVMITDEEEIKATNPVATERFGTVAVNLQNSSTDPATGDVHVMGALPGMVWQDRDVYLQGPIWAKIPHTDGHFHPSPLMGGFGLKHPPPQILIKNTPVPANPPAEFSATKFASFITQYSTGQVSVEIEWELQKENSKRWNPEVQYTSNYAKSANVDFTVDNNGLYTVPRPIGTRYLTRPL

SEQ ID NO: 1053 - protein, 736 aa, Artificial Sequence
  source: /note="Description of Artificial Sequence: Synthetic polypeptide"
MAADGYLPDWLEDNLSEGIREWWALKPGAPKPKANQQKQDDGRGLVLPGYKYLGPFNGLDKGEPVNAADAAALEHDKAYDQQLKAGDNPYLRYNHADAEFQERLQEDTSFGGNLGRAVFQAKKRLLEPLGLVEEGAKTAPGKKRPVEQSPQEPDSSSGIGKTGEQPAKKRLNFGQTGDSESVPDPQPLGEPPATPAAVGPTTMASGGGAPMADNNEGADGVGSASGNWHCDSTWLGDRVITTSTRTWALPTYNNHLYKQISSASTGASNDNHYFGYSTPWGYFDFNRFHCHFSPRDWQRLINNNWGFRPKRLNFKLFNIQVKEVTDNNGVKTIANNLTSTIQVFTDSEYQLPYVLGSAHQGCLPPFPADVFMIPQYGYLTLNNGSQAVGRSSFYCLEYFPSQMLRTGNNFPFSYTFEDVPFHSSYAHSQSLDRLMNPLIDQYLYYLSRTQTTGGTANTQTLGFSQGGPNTMANQAKNWLPGPCYRQQRVSTTTGQNNNSNFAWTAGTKYHLNGRNSLANPGIAMATHKDDKERFFPSNGILIFGKQNAARDNADYSDVMLTSEEEIKTTNPVATEEYGIVADNLQQQNTAPQIGTVNSQGALPGMVWQNRDVYLQGPIWAKIPHTDGNFHPSPLMGGFGLKHPPPQILIKNTPVPADPPTTFNQSKLNSFITQYSTGQVSVEIEWELQKENSKRWNPEIQYTSNYYKSTSVDFAVNTEGVYSEPHPIGTRYLTRPL

SEQ ID NO: 1054 - protein, 736 aa, Artificial Sequence
  source: /note="Description of Artificial Sequence: Synthetic polypeptide"
MAADGYLPDWLEDNLSEGIREWWALKPGAPKPKANQQKQDDGRGLVLPGYKYLGPFNGLDKGEPVNAADAAALEHDKAYDQQLKAGDNPYLRYNHADAEFQERLQEDTSFGGNLGRAVFQAKKRVLEPLGLVEEGAKTAPGKKRPVEQSPQEPDSSSGIGKTGQQPAKKRLNFGQTGDSESVPDPQPLGEPPATPAAVGPTTMASGGGAPMADNNEGADGVGSSSGNWHCDSQWLGDRVITTSTRTWALPTYNNHLYKQISSASTGASNDNHYFGYSTPWGYFDFNRFHCHFSPRDWQRLINNNWGFRPKRLNFKLFNIQVKEVTDNNGVKTIANNLTSTVQVFTDSEYQLPYVLGSAHQDCLPPFPADVFMIPQYGYLTLNNGSQAVGRSSFYCLEYFPSQMLRTGNNFTFSYTFEDVPFHSSYAHSQSLDRLMNPLIDQYLYYLSRTQTTGGTANTQTLGFSQGGPNTMANQAKNWLPGPCYRQQRVSTTTGQNNNSNFAWTAGTKYHLNGRNSLANPGIAMATHKDDKERFFPSNGILIFGKQNAARDNADYSDVMLTSEEEIKTTNPVATEEYGIVADNLQQQNTAPQIGTVNSQGALPGMVWQNRDVYLQGPIWAKIPHTDGNFHPSPLMGGFGLKHPPPQILIKNTPVPADPPTTFNQSKLNSFITQYSTGQVSVEIEWELQKENSKRWNPEIQYTSNYYKSTSVDFAVNTEGVYSEPHPIGTRYLTRPL

SEQ ID NO: 1055 - protein, 735 aa, Artificial Sequence
  source: /note="Description of Artificial Sequence: Synthetic polypeptide"
MAADGYLPDWLEDNLSEGIREWWDLKPGAPKPKANQQKQDDGRGLVLPGYKYLGPFNGLDKGEPVNAADAAALEHDKAYDQQLKAGDNPYLRYNHADAEFQERLQEDTSFGGNLGRAVFQAKKRVLEPLGLVEEGAKTAPGKKRPVEQSPQEPDSSSGIGKTGQQPAKKRLNFGQTGDSESVPDPQPLGEPPATPAAVGPTTMASGGGAPMADNNEGADGVGNASGNWHCDSTWLGDVITTSTRTWALPTYNNHLYKQISSASTGASNDNHYFGYSTPWGYFDFNRFHCHFSPRDWQRLINNNWGFRPKRLNFKLFNIQVKEVTQNEGTKTIANNLTSTIQVFTDSEYQLPYVLGSAHQGCLPPFPADVFMIPQYGYLTLNNGSQAVGRSSFYCLEYFPSQMLRTGNNFQFTYTFEDVPFHSSYAHSQSLDRLMNPLIDQYLYYLSRTQTTGGTANTQTLGFSQGGPNTMANQAKNWLPGPCYRQQRVSTTTGQNNNSNFAWTAGTKYHLNGRNSLANPGIAMATHKDDKERFFPSNGILIFGKQNAARDNADYSDVILTSEEEIKTTNPVATEEYGIVADNLQQQNTAPQIGTVNSQGALPGMVWQNRDVYLQGPIWAKIPHTDGNFHPSPLMGGFGLKHPPPQILIKNTPVPADPPTTFNQSKLNSFITQYSTGQVSVEIEWELQKENSKRWNPEIQYTSNYYKSTSVDFAVNTEGVYSEPHPIGTRYLTRPL

SEQ ID NO: 1056 - protein, 736 aa, Artificial Sequence
  source: /note="Description of Artificial Sequence: Synthetic polypeptide"
MAADGYLPDWLEDTLSEGIRQWWKLKPGPPPPKPAERHKDDSRGLVLPGYKYLGPFNGLDKGEPVNEADAAALEHDKAYDRQLDSGDNPYLKYNHADAEFQERLKEDTSFGGNLGRAVFQAKKRVLEPFGLVEEGAKTAPGKKRPVEQSPQEPDSSSGIGKTGQQPAKKRLNFGQTGDSESVPDPQPLGEPPATPAAVGPTTMASGGGAPMADNNEGADGVGNASGNWHCDSTWLGDRVITTSTRTWALPTYNNHLYKQISSTSTGASNDNHYFGYSTPWGYFDFNRFHCHFSPRDWQRLINNNWGFRPKRLNFKLFNIQVKEVTDNNGVKTIANNLTSTVQVFTDSEYQLPYVLGSAHQGCLPPFPADVFMIPQYGYLTLNNGSQAVGRSSFYCLEYFPSQMLRTGNNFTFSYTFEDVPFHSSYAHSQSLDRLMNPLIDQYLYYLSRTQTTGGTANTQTLGFSQGGPNTMANQAKNWLPGPCYRQQRVSTTTGQNNNSNFAWTAGTKYHLNGRNSLANPGIAMATHKDDKERFFPSNGILIFGKQNAARDNADYSDVMLTSEEEIKTTNPVATEEYGIVADNLQQQNTAPQIGTVNSQGALPGMVWQNRDVYLQGPIWAKIPHTDGNFHPSPLMGGFGLKHPPPQILIKNTPVPADPPTTFNQSKLNSFITQYSTGQVSVEIEWELQKENSKRWNPEIQYTSNYYKSTSVDFAVNTEGVYSEPHPIGTRYLTRPL

SEQ ID NO: 1057 - protein, 735 aa, Artificial Sequence
  source: /note="Description of Artificial Sequence: Synthetic polypeptide"
MAADGYLPDWLEDNLSEGIREWWDLKPGAPKPKANQQKQDDGRGLVLPGYKYLGPFNGLDKGEPVNAADAAALEHDKAYDRQLDSGDNPYLRYNHADAEFQERLKEDTSFGGNLGRAVFQAKKRVLEPFGLVEEGAKTAPGKKRPVEQSPQEPDSSSGIGKTGQQPAKKRLNFGQTGDSESVPDPQPLGEPPATPAAVGPTTMASGGGAPMADNNEGADGVGNASGNWHCDSTWLGDRVITTSTRTWALPTYNNHLYKQISSASTGASNDNHYFGYSTPWGYFDFNRFHCHFSPRDWQRLINNNWGFRPKRLNFKLFNIQVKEVTQNEGTKTIANNLTSTIQVFTDSEYQLPYVLGSAHQGCLPPFPADVFMIPQYGYLTLNNGSQAVGRSSFYCLEYFPSQMLRTGNNFQFTYTFEDVPFHSSYAHSQSLDRLMNPLIDQYLYYLSRTQTTGGTANTQTLGFSQGGPNTMANQAKNWLPGPCYRQQRVSTTTGQNNNSNFAWTAGTKYHLNGRNSLANPGIAMATHKDDRSVFFQYRDPDFGKQNAARDNADYSDVMLTSEEEIKTTNPVATEEYGIVADNLQQQNTAPQIGTVNSQGALPGMVWQNRDVYLQGPIWAKIPHTDGNFHPSPLMGGFGLKHPPPQILIKNTPVPADPPTTFNQSKLNSFITQYSTGQVSVEIEWELQKENSKRWNPEIQYTSNYYKSTSVDFAVNTEGVYSEPHPIGTRYLTRPL

SEQ ID NO: 1058 - protein, 736 aa, Artificial Sequence
  source: /note="Description of Artificial Sequence: Synthetic polypeptide"
MAADGYLPDWLEDNLSEGIREWWALKPGAPKPKANQQKQDDGRGLVLPGYKYLGPFNGLDKGEPVNAADAAALEHDKAYDQQLKAGDNPYLKYNHADAEFQERLQGDTSFGGNLGRAVFQAKKRVLEPLGLVEEAAKTAPGKKRPVEQSPQEPDSSAGIGKSGAQPAKKRLNFGQTGDTESVPDPQPLGEPPAAPSGVGPNTMAAGGGAPMADNNEGADGVGSSSGNWHCDSQWLGDRVITTSTRTWALPTYNNHLYKQISSASTGASNDNHYFGYSTPWGYFDFNRFHCHFSPRDWQRLINNNWGFRPKRLNFKLFNIQVKEVTDNNGVKTIANNLTSTVQVFTDSDYQLPYVLGSAHEGCLPPFPADVFMIPQYGYLTLNNGSQAVGRSSFYCLEYFPSQMLRTGNNFQFTYTFEDVPFHSSYAHSQSLDRLMNPLIDQYLYYLSRTQTTGGTANTQTLGFSQGGPNTMANQAKNWLPGPCYRQQRVSTTTGQNNNSNFAWTAGTKYHLNGRNSLANPGIAMATHKDDKERFFPSNGILIFGKQNAARDNADYSDVMLTSEEEIKTTNPVATEEYGIVADNLQQQNTAPQIGTVNSQGALPGMVWQNRDVYLQGPIWAKIPHTDGNFHPSPLMGGFGLKHPPPQILIKNTPVPADPPTTFNQSKLNSFITQYSTGQVSVEIEWELQKENSKRWNPEIQYTSNYYKSTSVDFAVNTEGVYSEPHPIGTRYLTRPL

SEQ ID NO: 1059 - protein, 736 aa, Artificial Sequence
  source: /note="Description of Artificial Sequence: Synthetic polypeptide"
MAADGYLPDWLEDTLSEGIRQWWKLKPGPPPPKPAERHKDDSRGLVLPGYKYLGPFNGLDKGEPVNEADAAALEHDKAYDRQLDSGDNPYLKYNHADAEFQERLKEDTSFGGNLGRAVFQAKKRVLEPFGLVEEAAKTAPGKKRPVEQSPQEPDSSSGIGKTGQQPAKKRLNFGQTGDSESVPDPQPLGEPPATPAAVGPTTMASGGGAPMADNNEGADGVGNASGNWHCDSTWLGDRVITTSTRTWALPTYNNHLYKQISSASTGASNDNHYFGYSTPWGYFDFNRFHCHFSPRDWQRLINNNWGFRPKRLNFKLFNIQVKEVTDNNGVKTIANNLTSTVQVFTDSDYQLPYVLGSAHEGCLPPFPADVFMIPQYGYLTLNNGSQAVGRSSFYCLEYFPSQMLRTGNNFTFSYTFEDVPFHSSYAHSQSLDRLMNPLIDQYLYYLSRTQTTGGTANTQTLGFSQGGPNTMANQAKNWLPGPCYRQQRVSTTTGQNNNSNFAWTAGTKYHLNGRNSLANPGIAMATHKDDKERFFPSNGILIFGKQNAARDNADYSDVMLTSEEEIKTTNPVATEEYGIVADNLQQQNTAPQIGTVNSQGALPGMVWQNRDVYLQGPIWAKIPHTDGNFHPSPLMGGFGLKHPPPQILIKNTPVPADPPTTFNQSKLNSFITQYSTGQVSVEIEWELQKENSKRWNPEIQYTSNYYKSTSVDFAVNTEGVYSEPHPIGTRYLTRPL

SEQ ID NO: 1060 - protein, 736 aa, Artificial Sequence
  source: /note="Description of Artificial Sequence: Synthetic polypeptide"
MAADGYLPDWLEDNLSEGIREWWALKPGAPKPKANQQKQDDGRGLVLPGYKYLGPFNGLDKGEPVNAADAAALEHDKAYDQQLKAGDNPYLRYNHADAEFQERLQEDTSFGGNLGRAVFQAKKRVLEPLGLVEEGAKTAPGKKRPVEQSPQEPDSSSGIGKTGQQPAKKRLNFGQTGDSESVPDPQPLGEPPATPAAVGPTTMASGGGAPMADNNEGADGVGSSSGNWHCDSTWLGDRVITTSTRTWALPTYNNHLYKQISSASTGASNDNHYFGYSTPWGYFDFNRFHCHFSPRDWQRLINNNWGFRPKRLNFKLFNIQVKEVTDNNGVKTIANNLTSTVQVFTDSEYQLPYVLGSAHQGCLPPFPADVFMIPQYGYLTLNNGSQAVGRSSFYCLEYFPSQMLRTGNNFTFSYTFEDVPFHSSYAHSQSLDRLMNPLIDQYLYYLSRTQTTGGTANTQTLGFSQGGPNTMANQAKNWLPGPCYRQQRVSTTTGQNNNSNFAWTAGTKYHLNGRNSLANPGIAMATHKDDKERFFPSNGILIFGKQNAARDNADYSDVMLTSEEEIKTTNPVATEEYGIVADNLQQQNTAPQIGTVNSQGALPGMVWQNRDVYLQGPIWAKIPHTDGNFHPSPLMGGFGLKHPPPQILIKNTPVPADPPTTFNQSKLNSFITQYSTGQVSVEIEWELQKENSKRWNPEIQYTSNYYKSTSVDFAVNTEGVYSEPHPIGTRYLTRPL

SEQ ID NO: 1061 - protein, 737 aa, Artificial Sequence
  source: /note="Description of Artificial Sequence: Synthetic polypeptide"
MAADGYLPDWLEDNLSEGIREWWALKPGAPKPKANQQKQDDGRGLVLPGYKYLGPFNGLDKGEPVNAADAAALEHDKAYDQQLKAGDNPYLRYNHADAEFQERLQEDTSFGGNLGRAVFQAKKRVLEPLGLVEEGAKTAPGKKRPVEQSPQEPDSSSGIGKTGQQPAKKRLNFGQTGDTESVPDPQPIGEPPAAPSGVGSLTMASGGGAPVADNNEGADGVGSSSGNWHCDSQWLGDRVITTSTRTWALPTYNNHLYKQISNSTSGGSSNDNAYFGYSTPWGYFDFNRFHCHFSPRDWQRLINNNWGFRPKRLNFKLFNIQVKEVTQNEGTKTIANNLTSTIQVFTDSEYQLPYVLGSAHQGCLPPFPADVFMIPQYGYLTLNNGSQAVGRSSFYCLEYFPSQMLRTGNNFQFTYTFEDVPFHSSYAHSQSLDRLMNPLIDQYLYYLSRTQTTGGTANTQTLGFSQGGPNTMANQAKNWLPGPCYRQQRVSTTTGQNNNSNFAWTAGTKYHLNGRNSLANPGIAMATHKDDKERFFPSNGILIFGKQNAARDNADYSDVMLTSEEEIKTTNPVATEEYGIVADNLQQQNTAPQIGTVNSQGALPGMVWQNRDVYLQGPIWAKIPHTDGNFHPSPLMGGFGLKHPPPQILIKNTPVPADPPTTFNQSKLNSFITQYSTGQVSVEIEWELQKENSKRWNPEIQYTSNYYKSTSVDFAVNTEGVYSEPHPIGTRYLTRPL

SEQ ID NO: 1062 - protein, 736 aa, Artificial Sequence
  source: /note="Description of Artificial Sequence: Synthetic polypeptide"
MAADGYLPDWLEDNLSEGIREWWALKPGAPKPKANQQKQDDGRGLVLPGYKYLGPFNGLDKGEPVNAADAAALEHDKAYDQQLKAGDNPYLKYNHADAEFQERLQGDTSFGGNLGRAVFQAKKRVLEPLGLVEEAAKTAPGKKRPVEQSPQEPDSSAGIGKSGAQPAKKRLNFGQTGDTESVPDPQPLGEPPAAPSGVGPNTMAAGGGAPMADNNEGADGVGSSSGNWHCDSQWLGDRVITTSTRTWALPTYNNHLYKQISSASTGASNDNHYFGYSTPWGYFDFNRFHCHFSPRDWQRLINNNWGFRPKRLNFKLFNIQVKEVTDNNGVKTIANNLTSTVQVFTDSEYQLPYVLGSAHQGCLPPFPADVFMIPQYGYLTLNNGSQAVGRSSFYCLEYFPSQMLRTGNNFTFSYTFEDVPFHSSYAHSQSLDRLMNPLIDQYLYYLSRTQTTGGTANTQTLGFSQGGPNTMANQAKNWLPGPCYRQQRVSTTTGQNNNSNFAWTAGTKYHLNGRNSLANPGIAMATHKDDKERFFPSNGILIFDKQNAARDNADYSDVMLTSEEEIKTTNPVATEEYGIVADNLQQQNTAPQIGTVNSQGALPGMVWQNRDVYLQGPIWAKIPHTDGNFHPSPLMGGFGLKHPPPQILIKNTPVPADPPTTFNQSKLNSFITQYSTGQVSVEIEWELQKENSKRWNPEIQYTSNYYKSTSVDFAVNTEGVYSEPHPIGTRYLTRPL

SEQ ID NO: 1063 - protein, 736 aa, Artificial Sequence
  source: /note="Description of Artificial Sequence: Synthetic polypeptide"
MAADGYLPDWLEDTLSEGIRQWWKLKPGPPPPKPAERHKDDSRGLVLPGYKYLGPFNGLDKGEPVNEADAAALEHDKAYDRQLDSGDNPYLKYNHADAEFQERLKEDTSFGGNLGRAVFQAKKRVLEPLGLVEEPVKTAPGKKRPVEHSPVEPDSSSGTGKAGQQPARKRLNFGQTGDSESVPDPQPLGEPPATPAAVGPNTMATGSGAPMADNNEGADGVGNSSGNWHCDSTWMGDRVITTSTRTWALPTYNNHLYKQISSASTGASNDNHYFGYSTPWGYFDFNRFHCHFSPRDWQRLINNNWGFRPKRLNFKLFNIQVKEVTDNNGVKTIANNLTSTIQVFTDSEYQLPYVLGSAHQGCLPPFPADVFMIPQYGYLTLNNGSQAVGRSSFYCLEYFPSQMLRTGNNFTFSYTFEDVPFHSSYAHSQSLDRLMNPLIDQYLYYLSRTQTTGGKANTQTLGFSQGGPNTMANQAKNWLPGPCYRQQRVSTTTGQNNNSNFAWTAGTKYHLNGRNSLANPGIAMATHKDDKERFFPSNGILIFGKQNAARDNADYSDVMLTSEEEIKTTNPVATEEYGIVADNLQQQNTAPQIGTVNSQGALPGMVWQNRDVYLQGPIWAKIPHTDGNFHPSPLMGGFGLKHPPPQILIKNTPVPADPPTTFNQSKLNSFITQYSTGQVSVEIEWELQKENSKRWNPEIQYTSNYYKSTSVDFAVNTEGVYSEPHPIGTRYLTRPL

SEQ ID NO: 1064 - protein, 736 aa, Artificial Sequence
  source: /note="Description of Artificial Sequence: Synthetic polypeptide"
MAADGYLPDWLEDNLSEGIREWWALKPGAPKPKANQQKQDDGRGLVLPGYKYLGPFNGLDKGEPVNAADAAALEHDKAYDQQLKAGDNPYLRYNHADAEFQERLQEDTSFGGNLGRAVFQAKKRVLEPFGLVEEGAKTAPGKKRPVEQSPQEPDSSSGIGKTGQQPAKKRLNFGQTGDSESVPDPQPLGEPPATPAAVGPTTMASGGGAPMADNNEGADGVGNASGNWHCDSTWLGDRVITTSTRTWALPTYNNHLYKQISSASTGASNDNHYFGYSTPWGYFDFNRFHCHFSPRDWQRLINNNWGFRPKRLNFKLFNIQVKEVTDNNGVKTIANNLTSTVQVFTDSEYQLPYVLGSAHQGCLPPFPADVFMIPQYGYLTLNNGSQAVGRSSFYCLEYFPSQMLRTGNNFTFSYTFEDVPFHSSYAHSQSLDRLMNPLIDQYLYYLSRTQTTGGTGNTQTLGFSQGGPNTMANQAKNWLPGPCYRQQRVSTTTGQNNNSNFAWTAGTKYHLNGRNSLANPGIAMATHKDDKERFFPSNGILIFGKQNAARDNADYSDVMLTSEEEIKTTNPVATEEYGIVADNLQQQNTAPQIGTVNSQGALPGMVWQNRDVYLQGPIWAKIPHTDGNFHPSPLMGGFGLKHPPPQILIKNTPVPADPPTTFNQSKLNSFITQYSTGQVSVEIEWELQKENSKRWNPEIQYTSNYYKSTSVDFAVNTEGVYSEPHPIGTRYLTRPL

SEQ ID NO: 1065 - protein, 736 aa, Artificial Sequence
  source: /note="Description of Artificial Sequence: Synthetic polypeptide"
MAADGYLPDWLEDNLSEGIREWWDLKPGAPKPKANQQKQDDGRGLVLPGYKYLGPFNGLDKGEPVNAADAAALEHDKAYDQQLKAGDNPYLRYNHADAEFQERLQEDTSFGGNLGRAVFQAKKRVLEPLGLVEEGAKTAPGKKRPVEQSPQEPDSSSGIGKTGQQPAKKRLNFGQTGDSESVPDPQPLGEPPATPAAVGPTTMASGGGAPMADNNEGADGVGSSSGNWHCDSTWLGDRVITTSTRTWALPTYNNHLYKQISSASTGASNDNHYFGYSTPWGYFDFNRFHCHFSPRDWQRLINNNWGFRPKRLNFKLFNIQVKEVTQNEGTKTIANNLTSTIQVFTDSEYQLPYVLGSAHQGCLPPFPADVFMIPQYGYLTLNNGSQAVGRSSFYCLEYFPSQMLRTGNNFTFSYTFEDVPFHSSYAHSQSLDRLMNPLIDQYLYYLSRTQTTGGTANTQTLGFSQGGPNTMANQAKNWLPGPCYRQQRVSTTTGQNNNSNFAWTAGTKYHLNGRNSLANPGIAMATHKDDKERFFPSNGILIFGKQNAARDNADYSDVMLTSEEEIKTTNPVATEEYGIVADNLQQQNTAPQIGTVNSQGALPGMVWQNRDVYLQGPIWAKIPHTDGNFHPSPLMGGFGLKHPPPQILIKNTPVPADPPTTFNQSKLNSFITQYSTGQVSVEIEWELQKENSKRWNPEIQYTSNYYKSTSVDFAVNTEGVYSEPHPIGTRYLTRPL

SEQ ID NO: 1066 - protein, 736 aa, Artificial Sequence
  source: /note="Description of Artificial Sequence: Synthetic polypeptide"
MAADGYLPDWLEDNLSEGIREWWALKPGAPKPKANQQKQDDGRGLVLPGYKYLGPFNGLDKGEPVNAADAAALEHDKAYDQQLKAGDNPYLRYNHADAEFQERLQEDTSFGGNLGRAVFQAKKRVLEPLGLVEEGAKTAPGKKRPVEQSPQEPDSSSGIGKTGQQPAKKRLNFGQTGDSESVPDPQPLGEPPATPAAVGPTTMAAGGGAPMADNNEGADGVGSSSGNWHCDSTWMGDRVITTSTRTWALPTYNNHLYKQISSASTGASNDNHYFGYSTPWGYFDFNRFHCHFSPRDWQRLINNNWGFRPKRLSFKLFNIQVKEVTQNEGTKTIANNLTSTIQVFTDSEYQLPYVLGSAHQGCLPPFPADVFMIPQYGYLTLNNGSQAVGRSSFYCLEYFPSQMLRTGNNFTFSYTFEDVPFHSSYAHSQSLDRLMNPLIDQYLYYLSRTQTTGGTANTQTLGFSQGGPNTMANQAKNWLQGPCYRQQRVSTTTGQNNNSNFAWTAGTKYHLNGRNSLANPGIAMATHKDDKERFFPSNGILIFGKQNAARDNADYSDVMLTSEEEIKTTNPVATEEYGIVADNLQQQNTAPQIGTVNSQGALPGMVWQNLDVYLQGPIWAKIPHTDGNFHPSPLMGGFGLKHPPPQILIKNTPVPADPPTTFNQSKLNSFITQYSTGQVSVEIEWELQKENSKRWNPEIQYTSNYYKSTSVDFAVNTEGVYSEPHPIGTRYLTRPL

SEQ ID NO: 1067 - protein, 737 aa, Artificial Sequence
  source: /note="Description of Artificial Sequence: Synthetic polypeptide"
MAADGYLPDWLEDNLSEGIREWWALKPGAPKPKANQQKQDDGRGLVLPGYKYLGPFNGLDKGEPVNAADAAALEHDKAYDQQLKAGDNPYLRYNHADAEFQERLQEDTSFGGNLGRAVFQAKKRVLEPLGLVEEGAKTAPGKKRPVEPSPQRSPDSSSGIGKTGQQPAKKRLNFGQTGDSESVPDPQPLGEPPATPAAVGPTTMASGGGAPMADNNEGADGVGNASGNWHCDSQWLGDRVITTSTRTWALPTYNNHLYKQISSASTGASNDNHYFGYSTPWGYFDFNRFHCHFSPRDWQRLINNNWGFRPKRLNFKLFNIQVKEVTDNNGVKTIANNLTSTVQVFTDSDYQLPYVLGSAHEGCLPPFPADVFMIPQYGYLTLNNGSQAVGRSSFYCLEYFPSQMLRTGNNFQFTYTFEDVPFHSSYAHSQSLDRLMNPLIDQYLYYLSRTQTTGGTANTQTLGFSQGGPNTMANQAKNWVPGPCYRQQRVSTATGQNNNSNFAWTAGTKYHLKGRNSLANPGIAMATHKDDKERFFPSNGILIFGKQNAARDNADYSDVMLTSEEEIKTTNPVATEEYGIVADNLQQQNTAPQIGTVNSQGALPGMVWQNRDVYLQGPIWAKIPHTDGNFHPSPLMGGFGLKHPPPQILIKNTPVPADPPTTFNQSKLNSFITQYSTGQVSVEIEWELQKENSKRWNPEIQYTSNYYKSTSVDFAVNTEGVYSEPHPIGTRYLTRPL

SEQ ID NO: 1068 - protein, 737 aa, Artificial Sequence
  source: /note="Description of Artificial Sequence: Synthetic polypeptide"
  MOD_RES (226)..(226): Any naturally occurring amino acid
  MOD_RES (233)..(233): Any naturally occurring amino acid
  MOD_RES (239)..(239): Any naturally occurring amino acid
  MOD_RES (250)..(250): Any naturally occurring amino acid
  MOD_RES (253)..(253): Any naturally occurring amino acid
  MOD_RES (255)..(255): Any naturally occurring amino acid
MAADGYLPDWLEDTLSEGIRQWWKLKPGPPPPKPAERHKDDSRGLVLPGYKYLGPFNGLDKGEPVNEADAAALEHDKAYDRQLDSGDNPYLKYNHADAEFQERLKEDTSFGGNLGRAVFQAKKRVLEPLGLVEEGAKTAPGKKRPVEQSPQEPDSSSGIGKTGQQPAKKRLNFGQTGDSESVPDPQPLGEPPATPSGVGPNTMAAGGGAPMADNNEGADGVGSSSXNWHCDSXWLGDRXITTSTRTWALXTYXNXLYKQISNSTSGGATNDNTYFGYSTPWGYFDFNRFHCHFSPRDWQRLINNNWGFRPKRLNFKLFNIQVKEVTQNEGTKTIANNLTSTIQVFTDSEYQLPYVLGSAHQGCLPPFPADVFMIPQYGYLTLNNGSQAVGRSSFYCLEYFPSQMLRTGNNFQFTYTFEDVPFHSSYAHSQSLDRLMNPLIDQYLYYLSRTQTTGGTANTQTLGFSQGGPNTMANQAKNWLPGPCYRQQRVSTTTGQNNNSNFAWTAGTKYHLNGRNSLANPGIAMATHKDDKERFFPSNGILIFGKQNAARDNADYSDVMLTSEEEIKTTNPVATEEYGIVADNLQQQNTAPQIGTVNSQGALPGMVWQNRDVYLQGPIWAKIPHTDGNFHPSPLMGGFGLKHPPPQILIKNTPVPADPPTTFSQAKLASFITQYSTGQVSVEIEWELQKENSKRWNPEVQYTSNYAKSANVDFTVDNNGLYTEPRPIGTRYLTRPL

SEQ ID NO: 1069 - protein, 737 aa, Artificial Sequence
  source: /note="Description of Artificial Sequence: Synthetic polypeptide"
MAADGYLPDWLEDNLSEGIREWWDLKPGAPKPKANQQKQDDGRGLVLPGYKYLGPFNGLDKGEPVNAADAAALEHDKAYDQQLKAGDNPYLRYNHADAEFQERLQEDTSFGGNLGRAVFQAKKRVLEPLGLVEEGAKTAPGKKRPVEPSPQRSPDSSTGIGKKGQQPAKKRLNFGQTGDSESVPDPQPIGEPPAGPSGVGSLTMASGGGAPVADNNEGADGVGSSSGNWHCDSQWLGDRVITTSTRTWALPTYNNHLYKQISSASTGASNDNHYFGYSTPWGYFDFNRFHCHFSPRDWQRLINNNWGFRPKRLNFKLFNIQVKEVTDNDGVKTIANNLTSTIQVFTDSEYQLPYVLGSAHQGCLPPFPADVFMIPQYGYLTLNNGSQAVGRSSFYCLEYFPSQMLRTGNNFTFSYTFEDVPFHSSYAHSQSLDRLMNPLIDQYLYYLSRTQTTGGTANTQTLGFSQGGPNTMANHAKNWLPGPCYRQQRVSTTTGQNNNSNFAWTAGTKYHLNGRNSLANPGIAMATHKDDKERFFPSNGILIFGKQNAARDNADYSDVMLTSEEEIKTTNPVATEEYGIVADNLQQQNTAPQIGTVNSQGALPGMVWQNRDVYLQGPIWAKIPHTDGNFHPSPLMGGFGLKHPPPQILIKNTPVPADPPTTFNQSKLNSFITQYSTGQVSVEIEWELQKENSKRWNPEIQYTSNYYKSTSVDFAVNTEGVYSEPHPIGTRYLTRPL

SEQ ID NO: 1070 - protein, 736 aa, Artificial Sequence
  source: /note="Description of Artificial Sequence: Synthetic polypeptide"
MAADGYLPDWLEDTLSEGIRQWWKLKPGPPPPKPAERHKDDSRGLVLPGYKYLGPFNGLDKGEPVNEADAAALEHDKAYDRQLDSGDNPYLKYNHADAEFQERLKEDTSFGGNLGRAVFQAKKRVLEPLGLVEEPVKTAPGKKRPVEHSPVEPDSSSGTGKAGQQPAKKRLNFGQTGDSESVPDPQPLGEPPATPAAVGPTTMASGGGAPMADNNEGADGVGNASGNWHCDSTWLGDRVITTSTRTWALPTYNNHLYKQISSASTGASNDNHYFGYSTPWGYFDFNRFHCHFSPRDWQRLINNNWGFRPKRLNFKLFNIQVKEVTQNEGTKTIANNLTSTIQVFTDSEYQLPYVLGSAHQGCLPPFPADVFMIPQYGYLTLNNGSQAVGRSSFYCLEYFPSQMLRTGNNFQFTYTFEDVPFHSSYAHSQSLDRLMNPLIDQYLYYLSRTQTTGGTANTQTLGFSQGGPNTMANQAKNWLPGPCYRQQRVSTTTGQNNNSNFAWTAGTKYHLNGRNSLANPGIAMATHKDDKERFFPSNGILIFGKQNAARDNADYSDVMLTSEEEIKTTNPVATEEYGIVADNLQQQNTAPQIGTVNSQGALPGMVWQNRDVYLQGPIWAKIPHTDGNFHPSPLMGGFGLKHPPPQILIKNTPVPADPPTTFNQSKLNSFITQYSTGQVSVEIEWELQKENSKRWNPEIQYTSNYYKSTSVDFAVNTEGVYSEPHPIGTRYLTRPL

SEQ ID NO: 1071 - protein, 736 aa, Artificial Sequence
  source: /note="Description of Artificial Sequence: Synthetic polypeptide"
MAADGYLPDWLEDNLSEGIREWWALKPGAPKPKANQQKQDDGRGLVLPGYKYLGPFNGLDKGEPVNAADAAALEHDKAYDQQLQAGDNPYLRYNHADAEFQERLQGDTSFGGNLGRAVFQAKKRVLEPLGLVEEGAKTAPGKKRPVEQSPQEPDSSSGIGKTGQQPAKKRLNFGQTGDSESVPDPQPLGEPPATPAAVGPTTMASGGGAPMADNNEGADGVGNASGNWHCDSTWLGDRVITTSTRTWALPTYNNHLYKQISSASTGASNDNHYFGYSTPWGYFDFNRFHCHFSPRDWQRLINNNWGFRPKRLNFKLFNIQVKEVTDNNGVKTIANNLTSTIQVFTDSEYQLPYVLGSAHQGCLPPFPADVFMIPQYGYLTLNNGSQAVGRSSFYCLEYFPSQMLRTGNNFQFTYTFEDVPFHSSYAHSQSLDRLMNPLIDQYLYYLSRTQTTGGTANTQTLGFSQGGPNTMANQAKNWLPGPCYRQQRVSTTTGQNNNSNFAWTAGTKYHLNGRNSLANPGIAMATHKDDKERFFPSNGILIFGKQNAARDNADYSDVMLTSEEEIKTTNPVATEEYGIVADNLQQQNTAPQIGTVNSQGALPGMVWQNRDVYLQGPIWAKIPHTDGNFHPSPLMGGFGLKHPPPQILIKNTPVPADPPTTFNQSKLNSFITQYSTGQVSVEIEWELQKENSKRWNPEIQYTSNYYKSTSVDFAVNTEGVYSEPHPIGTRYLTRPL

SEQ ID NO: 1072 - protein, 738 aa, Artificial Sequence
  source: /note="Description of Artificial Sequence: Synthetic polypeptide"
MAADGYLPDWLEDTLSEGIRQWWKLKPGPPPPKPAERHKDDSRGLVLPGYKYLGPFNGLDKGEPVNAADAAALEHDKAYDQQLKAGDNPYLRYNHADAEFQERLKEDTSFGGNLGRAVFQAKKRVLEPLGLVEEGAKTAPGKKRPVEPSPQRSPDSSTGIGKKGQQPARKRLNFGQTGDSESVPDPQPLGEPPAAPSGVGPNTMAAGGGAPMADNNEGADGVGSSSGNWHCDSQWLGDRVITTSTRTWALPTYNNHLYKQISNSTSGGSSNDNAYFGYSTPWGYFDFNRFHCHFSPRDWQRLINNNWGFRPKRLNFKLFNIQVKEVTDNNGVKTIANNLTSTVQVFTDSEYQLPYVLGSAHQGCLPPFPADVFMIPQYGYLTLNNGSQAVGRSSFYCLEYFPSQMLRTGNNFTFSYTFEDVPFHSSYAHSQSLDRLMNPLIDQYLYYLSRTQTTGGTANTQTLGFSQGGPNTMANQAKNWLPGPCYRQQRVSTTTGQNNNSNFAWTAGTKYHLNGRNSLANPGIAMATHKDDKERFFPSNGILIFGKQNAARDNADYSDVMLTSEEEIKTTNPVATEEYGIVADNLQQQNTAPQIGTVNSQGALPGMVWQNRDVYLQGPIWAKIPHTDGHFHPSPLMGGFGLKHPPPQILIKNTPVPANPPTTFNQSKLNSFITQYSTGQVSVEIEWELQKENSKRWNPEVQYTSNYAKSANVDFTVDNNGLYTEPRPIGTRYLTRPL

SEQ ID NO: 1073 - protein, 738 aa, Artificial Sequence; identical to SEQ ID NO: 1072
  source: /note="Description of Artificial Sequence: Synthetic polypeptide"

SEQ ID NO: 1074 - protein, 736 aa, Artificial Sequence
  source: /note="Description of Artificial Sequence: Synthetic polypeptide"
MAADGYLPDWLEDNLSEGIREWWALKPGAPKPKANQQKQDDGRGLVLPGYKYLGPFNGLDKGEPVNAADAAALEHDKAYDQQLKAGDNPYLRYNHADAEFQERLQEDTSFGGNLGRAVFQAKKRLLEPLGLVEEGAKTAPGKKRPVEQSPQEPDSSSGIGKTGQQPAKKRLNFGQTGDSESVPDPQPLGEPPATPAAVGPTTMASGGGAPMADNNEGADGVGNSSGNWHCDSTWMGDRVITTSTRTWALPTYNNHLYKQISSASTGASNDNHYFGYSTPWGYFDFNRFHCHFSPRDWQRLINNNWGFRPKRLNFKLFNIQVKEVTQNEGTKTIANNLTSTIQVFTDSEYQLPYVLGSAHQGCLPPFPADVFIIPQYGYLTLNNGSQAVGRSSFYCLEYFPSQMLRTGNNFTFSYTFEDVPFHSSYAHSQSLDRLMNPLIDQYLYYLSRTQTTGGTANTQTLGFSQGGPNTMANQAKNWLPGPCYRQQRVSTTTGQNNNSNFAWTAGTKYHLNGRNSLANPGIAMATHKDDKERFFPSNGILIFGKQNAARDNADYSDVMLTSEEEIKTTNPVATEEYGIVADNLQQQNTAPQIGTVNSQGALPGMVWQNRDVYLQGPIWAKIPHTDGNFHPSPLMGGFGLKHPPPQILIKNTPVPADPPTTFNQSKLNSFITQYSTGQVSVEIEWELQKENSKRWNPEIQYTSNYYKSTSVDFAVNTEGVYSEPHPIGTRYLTRPL

SEQ ID NO: 1075 - protein, 736 aa, Artificial Sequence
  source: /note="Description of Artificial Sequence: Synthetic polypeptide"
MAADGYLPDWLEDNLSEGIREWWALKPGAPKPKANQQKQDDGRGLVLPGYKYLGPFNGLDKGEPVNAADAAALEHDKAYDQQLKAGDNPYLRYNHADAEFQERLQEDTSFGGNLGRAVFQAKKRVLEPFGLVEEAAKTAPGKKRPVEQSPQEPDSSSGIGKTGQQPAKKRLNFGQTGDSESVPDPQPLGEPPATPAAVGPTTMASGGGAPMADNNEGADGVGNASGNWHCDSTWLGDRVITTSTRTWALPTYNNHLYKQISSASTGASNDNHYFGYSTPWGYFDFNRFHCHFSPRDWQRLINNNWGFRPKRLNFKLFNIQVKEVTQNEGTKTIANNLTSTIQVFTDSEYQLPYVLGSAHQGCLPPFPADVFMIPQYGYLTLNNGSQAVGRSSFYCLEYFPSQMLRTGNNFTFSYTFEDVPFHSSYAHSQSLDRLMNPLIDQYLYYLSRTQTTGGTANTQTLGFSQGGPNTMANHAKNWLPGPCYRQQRVSTTTGQNNNSNFAWTAGTKYHLNGRNSLANPGIAMATHKDDKERFFPSNGILIFGKQNAARDNADYSDVMLTSEEEIKTTNPVATEEYGIVADNLQQQNTAPQIGTVNSQGALPGMVWQNRDVYLQGPIWAKIPHTDGNFHPSPLMGGFGLKHPPPQILIKNTPVPADPPTTFNQSKLNSFITQYSTGQVSVEIEWELQKENSKRWNPEIQYTSNYYKSTSVDFAVNTEGVYSEPHPIGTRYLTRPL

SEQ ID NO: 1076 - protein, 736 aa, Artificial Sequence
  source: /note="Description of Artificial Sequence: Synthetic polypeptide"
MAADGYLPDWLEDNLSEGIREWWALKPGAPKPKANQQKQDDGRGLVLPGYKYLGPFNGLDKGEPVNEADAAALEHDKAYDQQLKAGDNPYLRYNHADAEFQERLQEDTSFGGNLGRAVFQAKKRLLEPLGLVEEAAKTAPGKKRPVEQSPQEPDSSAGIGKSGAQPAKKRLNFGQTGDSESVPDPQPLGEPPATPAAVGPTTMASGGGAPMADNNEGADGVGNASGNWHCDSTWLGDRVITTSTRTWALPTYNNHLYKQISSASTGASNDNHYFGYSTPWGYFDFNRFHCHFSPRDWQRLINNNWGFRPKRLNFKLFNIQVKEVTDNDGVKTIANNLTSTIQVFTDSEYQLPYVLGSAHQGCLPPFPADVFMIPQYGYLTLNNGSQAVGRSSFYCLEYFPSQMLRTGNNFQFTYTFEDVPFHSSYAHSQSLDRLMNPLIDQYLYYLSRTQTTGGTANTQTLGFSQGGPNTMANQAKNWLPGPCYRQQRVSTTTGQNNNSNFAWTAGTKYHLNGRNSLANPGIAMATHKDDKERFFPSNGILIFGKQNAARDNADYSDVMLTSEEEIKTTNPVATEEYGIVADNLQQQNTAPQIGTVNSQGALPGMVWQNRDVYLQGPIWAKIPHTDGNFHPSPLMGGFGLKHPPPQILIKNTPVPADPPTTFNQSKLNSFITQYSTGQVSVEIEWELQKENSKRWNPEIQYTSNYYKSTSVDFAVNTEGVYSEPHPIGTRYLTRPL

SEQ ID NO: 1077 - protein, 736 aa, Artificial Sequence
  source: /note="Description of Artificial Sequence: Synthetic polypeptide"
MAADGYLPDWLEDNLSEGIREWWALKPGAPKPKANQQKQDDGRGLVLPGYKYLGPFNGLDKGEPVNAADAAALEHDKAYDQQLKAGDNPYLRYNHADAEFQERLQEDTSFGGNLGRAVFQAKKRVLEPLGLVEEGAKTAPGKKRPVEQSPQEPDSSAGIGKTGAQPAKKRLNFGQTGDSESVPDPQPLGEPPATPAAVGPTTMASGGGAPMADNNEGADGVGSASGNWHCDSTWLGDRVITTSTRTWALPTYNNHLYKQISSASTGASNDNHYFGYSTPWGYFDFNRFHCHFSPRDWQRLINNNWGFRPKRLNFKLFNIQVKEVTDNNGVKTIANNLTSTIQVFTDSEYQLPYVLGSAHQGCLPPFPADVFMIPQYGYLTLNNGSQAVGRSSFYCLEYFPSQMLRTGNNFTFSYTFEDVPFHSSYAHSQSLDRLMNPLIDQYLYYLSRTQTTGGTANTQTLGFSQGGPNTMANQAKNWLPGPCYRQQRVSTTTGQNNNSNFAWTAGTKYHLNGRNSLANPGIAMATHKDDKERFFPSNGILIFGKQNAARDNADYSDVMLTSEEEIKTTNPVATEEYGIVADNLQQQNTAPQIGTVNSQGALPGMVWQNRDVYLQGPIWAKIPHTDGNFHPSPLMGGFGLKHPPPQILIKNTPVPADPPTTFNQSKLNSFITQYSTGQVSVEIEWELQKENSKRWNPEIQYTSNYYKSTSVDFAVNTEGVYSEPHPIGTRYLTRPL

SEQ ID NO: 1078 - protein, 736 aa, Artificial Sequence
  source: /note="Description of Artificial Sequence: Synthetic polypeptide"
MAADGYLPDWLEDNLSEGIREWWDLKPGAPKPKANQQKQDDGRGLVLPGYKYLGPFNGLDKGEPVNAADAAALEHDKAYDQQLKAGDNPYLRYNHADAEFQERLQEDTSFGGNLGRAVFQAKKRLLEPLGLVEEAAKTAPGKKRPVEQSPQEPDSSAGIGKSGAQPAKKRLNFGQTGDTESVPDPQPIGEPPAAPSGVGPNTMAAGGGAPMADNNEGADGVGSSSGNWHCDSQWLGDRVITTSTRTWALPTYNNHLYKQISSASTGASNDNHYFGYSTPWGYFDFNRFHCHFSPRDWQRLINNNWGFRPKRLNFKLFNIQVKEVTQNEGTKTIANNLTSTIQVFTDSEYQLPYVLGSAHQGCLPPFPADVFMIPQYGYLTLNNGSQAVGRSSFYCLEYFPSQMLRTGNNFQFTYTFEDVPFHSSYAHSQSLDRLMNPLIDQYLYYLSRTQTTGGTANTQTLGFSQGGPNTMANHAKNWLPGPCYRQQRVSTTTGQNNNSNFAWTAGTKYHLNGRNSLANPGIAMATHKDDKERFFPSNGILIFGKQNAARDNADYSDVMLTSEEEIKTTNPVATEEYGIVADNLQQQNTAPQIGTVNSQGALPGMVWQNRDVYLQGPIWAKIPHTDGNFHPSPLMGGFGLKHPPPQILIKNTPVPADPPTTFNQSKLNSFITQYSTGQVSVEIEWELQKENSKRWNPEIQYTSNYYKSTSVDFAVNTEGVYSEPHPIGTRYLTRPL

SEQ ID NO: 1079 - protein, 737 aa, Artificial Sequence; identical to SEQ ID NO: 1061
  source: /note="Description of Artificial Sequence: Synthetic polypeptide"

SEQ ID NO: 1080 - protein, 737 aa, Artificial Sequence
  source: /note="Description of Artificial Sequence: Synthetic polypeptide"
MAADGYLPDWLEDNLSEGIREWWALKPGAPKPKANQQKQDDGRGLVLPGYKYLGPFNGLDKGEPVNAADAAALEHDKAYDQQLKAGDNPYLRYNHADAEFQERLKEDTSFGGNLGRAVFQAKKRVLEPFGLVEEGAKTAPGKKRPVEQSPQEPDSSSGIGKTGQQPAKKRLNFGQTGDSESVPDPQPLGEPPAAPSGVGPNTMAAGGGAPMADNNEGADGVGSSSGNWHCDSQWLGNRVITTSTRTWALPTYNNHLYKQISNSTSGGSSNDNAYFGYSTPWGYFDFNRFHCHFSPRDWQRLINNNWGFRPKRLNFKLFNIQVKEVTDNNGVKTIANNLTSTVQVFTDSEYQLPYVLGSAHQGCLPPFPADVFMIPQYGYLTLNNGSQAVGRSSFYCLEYFPSQMLRTGNNFQFTYTFEDVPFHSSYAHSQSLDRLMNPLIDQYLYYLSRTQTTGGTANTQTLGFSQGGPNTMANQAKNWLPGPCYRQQRVSTTTGQNNNSNFAWTAGTKYHLNGRNSLANPGIAMATHKDDKERFFPSNGILIFGKQNAARDNADYSDVMLTSEEEIKTTNPVATEEYGIVADNLQQQNTAPQIGTVNSQGALPGMVWQNRDVYLQGPIWAKIPHTDGNFHPSPLMGGFGLKHPPPQILIKNTPVPADPPTTFNQSKLNSFITQYSTGQVSVEIEWELQKENSKRWNPEIQYTSNYYKSTSVDFAVNTEGVYSEPHPIGTRYLTRPL

SEQ ID NO: 1081 - protein, 736 aa, Artificial Sequence
  source: /note="Description of Artificial Sequence: Synthetic polypeptide"
MAADGYLPDWLEDNLSEGIREWWDLKPGAPKPKANQQKQDDGRGLVLPGYKYLGPFNGLDRGEPVNAADAAALEHDKAYDQQLKAGDNPYLRYNHADAEFQERLQEDTSFGGNLGRAVFQAKKRVLEPLGLVEEGAKTAPGKKRPVEQSPQEPDSSSGIGKTGQQPAKKRLNFGQTGDSESVPDPQPLGEPPATPAAVGPTTMASGGGAPMADNNEGADGVGNASGNWHCDSTWLGDRVITTSTRTWALPTYNNHLYKQISSASTGASNDNHYFGYSTPWGYFDFNRFHCHFSPRDWQRLINNNWGFRPKRLNFKLFNIQVKEVTDNNGVKTIANNLTSTIQVFTDSEYQLPYVLGSAHQGCLPPFPADVFMIPQYGYLTLNNGSQAVGRSSFYCLEYFPSQMLRTGNNFQFTYTFEDVPFHSSYAHSQSLDRLMNPLIDQYLYYLSRTQTTGGTANTQTLGFSQGGPNTMANQAKNWLPGPCYRQQRVSTTTGQNNNSNFAWTAGTKYHLNGRNSLANPGIAMATHKDDKERFFPSNGILIFGKQNAARDNADYSDVMLTSEEEIKTTNPVATEEYGIVADNLQQQNTAPQIGTVNSQGALPGMVWQNRDVYLQGPIWAKIPHTDGNFHPSPLMGGFGLKHPPPQILIKNTPVPADPPTTFNQSKLNSFITQYSTGQVSVEIEWELQKENSKRWNPEIQYTSNYYKSTSVDFAVNTEGVYSEPHPIGTRYLTRPL

SEQ ID NO: 1082 - protein, 736 aa, Artificial Sequence
  source: /note="Description of Artificial Sequence: Synthetic polypeptide"
MAADGYLPDWLEDNLSEGIREWWDLKPGAPKPKANQQKQDDGRGLVLPGYKYLGPFNGLDKGEPVNAADAAALEHDKAYDQQLKAGDNPYLRYNHADAEFQERLQEDTSFGGNLGRAVFQAKKRVLEPLGLVEEGAKTAPGKKRPVEQSPQEPDSSSGIGKKGQQPARKRLNFGQTGDSESVPDPQPLGEPPAAPSGVGSLTMASGGGAPMADNNEGADGVGNASGNWHCDSTWLGDRVITTSTRTWALPTYNNHLYKQISSASTGASNDNHYFGYSTPWGYFDFNRFHCHFSPRDWQRLINNNWGFRPKRLNFKLFNIQVKEVTQNEGTKTIANNLTSTVQVFTDSDYQLPYVLGSAHQGCLPPFPADVFMIPQYGYLTLNNGSQAVGRSSFYCLEYFPSQMLRTGNNFQFTYTFEDVPFHSSYAHSQSLDRLMNPLIDQYLYYLSRTQTTGGTANTQTLGFSQGGPNTMANQAKNWLPGPCYRQQRVSTTTGQNNNSNFAWTAGTKYHLNGRNSLSNPGIAMATHKDDKERFFPSNGILIFGKQNAARDNADYSDVMLTSEEEIKTTNPVATEEYGIVADNLQQQNTAPQIGTVNSQGALPGMVWQNRDMYLQGPIWAKIPHTDGNFHPSPLMGGFGLKHPPPQILIKNTPVPADPPTTFNQSKLNSFITQYSTGQVSVEIEWELQKENSKRWNPEIQYTSNYYKSTSVDFAVNTEGVYSEPHPIGTRYLTRPL

SEQ ID NO: 1083 - protein, 736 aa, Artificial Sequence
  source: /note="Description of Artificial Sequence: Synthetic polypeptide"
MAADGYLPDWLEDNLSEGIREWWALKPGAPKPKANQQKQDDGRGLVLPGYKYLGPFNGLDKGEPVNAADAAALEHDKAYDQQLKAGDNPYLRYNHADAEFQERLQEDTSFGGNLGRAVFQAKKRVLEPFGLVEEGAKTAPGKKRPVEQSPQEPDSSSGIGKTGQQPAKKRLNFGQTGGSESVPDPQPLGEPPATPAAVGPTTMAAGGGAPMADNNEGADGVGSSSGNWHCDSTWLGDRVITTSTRTWALPTYNNHLYKQISSASTGASNDNHYFGYSTPWGYFDFNRFHCHFSPRDWQRLINNNWGFRPKRLNFKLFNIQVKEVTDNNGVKTIANNLTSTVQVFTDSEYQLPYVLGSAHQGCLPPFPADVFMIPQYGYLTLNNGSQAVGRSSFYCLEYFPSQMLRTGNNFTFSYTFEEVPFHSSYAHSQSLDRLMNPLIDQYLYYLSRTQTTGGTANTQTLGFSQGGPNTMANQAKNWLPGPCYRQQRVSTTTGQNNNSNFAWTAGTKYHLNGRNSLANPGIAMASHKDDKERFFPSNGILIFGKQNAARDNADYSDVMLTSEEEIKTTNPVATEEYGIVADNLQQQNTAPQIGTVNSQGALPGMVWQNRDVYLQGPIWAKIPHTDGNFHPSPLMGGFGLKHPPPQILIKNTPVPADPPTTFNQSKLNSFITQYSTGQVSVEIEWELQKENSKRWNPEIQYTSNYYKSTSVDFAVNTEGVYSEPHPIGTRYLTRPL

SEQ ID NO: 1084 - DNA, 2211 bp, Artificial Sequence
  source: /note="Description of Artificial Sequence: Synthetic polynucleotide"
atggctgccgatggttatcttccagattggctcgaggacaacctctctgagggcattcgcgagtggtgggacttgaaacctgcatccccgaaacccaaagccaaccagcaaaagcaggacgacggccggggtctggtgcttcctggctacaagtacctcggacccttcaacggactcgacaagggggagcccgtcaacgcggcggacgcagcggccctcgagcacgacaaggcctacgaccagcagctcaaagcgggtgacaatccgtacctgcggtataaccacgccgacgccgagtttcaggagcgtctgcaagaagatacgtcttttgggggcaacctcgggcgagcagtcttccaggccaaaaagaggcttcttgaacctcttggtctggttgaggaagcggctaagacggctcctggaaagaagaggcctgtagagcagtctcctcaggaaccggactcctccgcgggtattggcaaatcgggtgcacagcccgccaaaaagagactcaatttcggtcagactggcggcacagagtcagttccagaccctcaacctctcggagaacctccagcagcgccctctggtgtgggacctaatacaatggctgcaggcggtggcgcaccaatggcagacaataacgaaggcgccgacggagtgggtagttcctcgggaaattggcattgcgattccacatggctgggcgacagagtcatcaccaccagcaccagaacctgggccctgcccacttacaacaaccatctctacaagcaaatctccagtgcttcaacgggggccagcaacgacaaccactacttcggctacagcaccccctgggggtattttgatttcaacagattccactgccacttctcaccacgtgactggcagcgactcatcaacaacaactggggattccggcccaagagactcagcttcaagctcttcaacatccaggtcaaggaggtcacgcagaatgaaggcaccaagaccatcgccaataacctcaccagcaccatccaggtgtttacggactcggagtaccagctgccgtacgttctcggctctgcccaccagggctgcctgcctccgttcccggcggacgtgttcatgattccccagtacggatacctaacactcaacaacggtagtcaggccgtgggacgctcctccttctactgcctggaatactttccttcgcagatgctgagaaccggcaacaacttccagtttacttacaccttcgaggacgtgcctttccacagcagctacgcccacagccagagcttggaccggctgatgaatcctctgattgaccagtacctgtactacttgtctcggactcaaacaacaggaggcacggcaaatacgcagactctgggcttcagccaaggtgggcctaatacaatggccaatcaggcaaagaactggctgccaggaccctgttaccgccaacaacgcgtctcaacgacaaccgggcaaaacaacaatagcaactttgcctggactgctgggaccaaataccatctgaatggaagaaattcattggctaatcctggcatcgctatggcaacacacaaagacgacaaggagcgtttttttcccagtaacgggatcctgatttttggcaaacaaaatgctgccagagacaatgcggattacagcgatgtcatgctcaccagcgaggaagaaatcaaaaccactaaccctgtggctacagaggaatacggtatcgtggcagataacttgcagcagcaaaacacggctcctcaaattggaactgtcaacagccagggggccttacccggtatggtctggcagaaccgggacgtgtacctgcagggtcccatctgggccaagattcctcacacggacggcaacttccacccgtctccgctgatgggcggctttggcctgaaacatcctccgcctcagatcctgatcaagaacacgcctgtacctgcggatcctccgaccaccttcaaccagtcaaagctgaactctttcatcacgcaatacagcaccggacaggtcagcgtggaaattgaatgggagctgcagaaggaaaacagcaagcgctggaaccccgagatccagtacacctccaactactacaaatctacaagtgtggactttgctgttaatacagaaggcgtgtactctgaaccccaccccattggcacccgttacctcacccgtcccctgtaa

SEQ ID NO: 1085 - DNA, 2211 bp, Artificial Sequence
  source: /note="Description of Artificial Sequence: Synthetic polynucleotide"
atggctgccgatggttatcttccagattggctcgaggacaacctctctgagggcattcgcgagtggtgggacttgaaacctggagccccgaaacccaaagccaaccagcaaaagcaggacgacggccggggtctggtgcttcctggctacaagtacctcggacccttcaacggactcgacaagggggagcccgtcaacgcggcggacgcagcggccctcgagcacgacaaggcctacgaccagcagctcaaagcgggtgacaatccgtacctgcggtataaccacgccgacgccgagtttcaggagcgtctgcaagaagatacgtcttttgggggcaacctcgggcgagcagtcttccaggccaagaagagggttctcgaaccttttggtctggttgaggaaggcgctaagacggctcctggaaagaaacgtccggtagagcagtcgccacaagagccagactcctcctcgggcattggcaagacaggccagcagcccgctaaaaagagactcaattttggtcagactggcgactcagagtcagtccccgacccacaacctctcggagaacctccagcaacccccgctgctgtgggacctactacaatggcttcaggtggtggcgcaccaatggcagacaataacgaaggcgccgacggagtgggtaatgcctcaggaaattggcattgcgattcccaatggctgggggacagagtcatcaccaccagcacccgaacctgggccctgcccacctacaacaatcacctctacaagcaaatctccagtgcttcaacgggggccagcaacgacaaccactacttcggctacagcaccccctgggggtattttgatttcaacagattccactgccatttctcaccacgtgactggcagcgactcatcaacaacaattggggattccggcccaagagactcaacttcaaactcttcaacatccaagtcaaggaggtcacgcagaatgaaggcaccaagaccatcgccaataacctcaccagcaccatccaggtgtttacggactcggagtaccagctgccgtacgttctcggctccgcccaccagggctgcctgcctccgttcccggcggacgtgttcatgattccccagtacggctacctaacactcaacaacggtagtcaggccgtgggacgctcctccttctactgcctggaatactttccttcgcagatgctgagaaccggcaacaacttccagtttacttacaccttcgaggacgtgcctttccacagcagctacgcccacagccagagcttggaccggctgatgaatcctctgattgaccagtacctgtactacttgtctcggactcaaacaacaggaggcacggcaaatacgcagactctgggcttcagccaaggtgggcctaatacaatggccaatcaggcaaagaactggctgccaggaccctgttaccgccaacaacgcgtctcaacgacaaccgggcaaaacaacaatagcaactttgcctggactgctgggaccaaataccatctgaatggaagaaattcattggctaatcctggcatcgctatggcaacacacaaagacgacaaggagcgtttttttcccagtaacgggatcctgatttttggcaaacaaaatgctgccagagacaatgcggattacagcgatgtcatgctcaccagcgaggaagaaatcaaaaccactaaccctgtggctacagaggaatacggtatcgtggcagataacttgcagcagcaaaacacggctcctcaaattggaactgtcaacagccagggggccttacccggtatggtctggcagaaccgggacgtgtacctgcagggtcccatctgggccaagattcctcacacggacggcaacttccacccgtctccgctgatgggcggctttggcctgaaacatcctccgcctcagatcctgatcaagaacacgcctgtacctgcggatcctccgaccaccttcaaccagtcaaagctgaactctttcatcacgcaatacagcaccggacaggtcagcgtggaaattgaatgggagctgcagaaggaaaacagcaagcgctggaaccccgagatccagtacacctccaactactacaaatctacaagtgtggactttgctgttaatacagaaggcgtgtactctgaaccccaccccattggcacccgttacctcacccgtcccctgtaa

SEQ ID NO: 1086 - DNA, 2211 bp, Artificial Sequence
  source: /note="Description of Artificial Sequence: Synthetic polynucleotide"
atggctgccgatggttatcttccagattggctcgaggacaacctctctgagggcattcgcgagtggtgggacttggaacctggagccccgaagcccaaagccaaccagcaaaagcaggacgacggccggggtctggtgcttcctggctacaagtacctcggacccttcaacggactcgacaagggggagcccgtcaacgcggcggacgcagcggccctcgagcacgacaaggcctacgaccagcagctcaaagcgggtgacaatccgtacctgcggtataaccacgccgacgccgagtttcaggagcgtctgcaagaagatacgtcttttgggggcaacctcgggcgagcagtcttccaggccaagaagcgggttctcgaacctctcggtctggttgaggaaggcgctaagacggctcctggaaagaaacgtccggtagagcagtcgccacaagagccagactcctcctcgggcatcggcaagacaggccagcagcccgctaaaaagagactcaattttggtcagactggcgactcagagtcagtccccgatccacaacctctcggagaacctccagcaacccccgctgctgtgggacctactacaatggcttcaggcggtggcgcaccaatggcagacaataacgaaggcgccgacggagtgggtaatgcctcaggaaattggcattgcgattccacatggctgggcgacagagtcatcaccaccagcacccgcacctgggccttgcccacctacaataaccacctctacaagcaaatctccagtgcttcaacaggggccagcaacgacaaccactacttcggctacagcaccccctgggggtattttgacttcaacagattccactgccacttctcaccacgtgactggcagcgactcatcaacaacaactggggattccggcctaagcgactcaacttcaagctcttcaacattcaggtcaaagaggttacggacaacaatggagtcaagaccatcgccaataaccttaccagcacggtccaggtcttcacggactcggagtaccagttgccgtacgtcctcggctctgcgcaccagggctgcctccctccgttcccggcggacgtgttcatgattccgcagtacggctacctaacgctcaacaacggtagtcaggccgtgggacgctcctccttctactgcctggaatactttccttcgcagatgctgagaaccggcaacaacttccagtttacttacaccttcgaggacgtgcctttccacagcagctacgcccacagccagagcttggaccggctgatgaatcctctgattgaccagtacctgtactacttgtctcggactcaaacaacaggaggcacggcaaatacgcagactctgggcttcagccaaggtgggcctaatacaatggccaatcaggcaaagaactggctgccaggaccctgttaccgccaacaacgcgtctcaacgacaaccgggcaaaacaacaatagcaactttgcctggactgctgggaccaaataccatctgaatggaagaaattcattggctaatcctggcatcgctatggcaacacacaaagacgacaaggagcgtttttttcccagtaacgggatcctgatttttggcaaacaaaatgctgccagagacaatgcggattacagcgatgtcatgctcaccagcgaggaagaaatcaaaaccactaaccctgtggctacagaggaatacggtatcgtggcagataacttgcagcagcaaaacacggctcctcaaattggaactgtcaacagccagggggccttacccggtatggtctggcagaaccgggacgtgtacctgcagggtcccatctgggccaagattcctcacacggacggcaacttccacccgtctccgctgatgggcggctttggcctgaaacatcctccgcctcagatcctgatcaagaacacgcctgtacctgcggatcctccgaccaccttcaaccagtcaaagctgaactctttcatcacgcaatacagcaccggacaggtcagcgtggaaattgaatgggagctgcagaaggaaaacagcaagcgctggaaccccgagatccagtacacctccaactactacaaatctacaagtgtggactttgctgttaatacagaaggcgtgtactctgaaccccaccccattggcacccgttacctcacccgtcccctgtaa

SEQ ID NO: 1087 - DNA, 2211 bp, Artificial Sequence
  source: /note="Description of Artificial Sequence: Synthetic polynucleotide"
atggctgccgatggttatcttccagattggctcgaggacactctctctgaaggaataagacagtggtggaagctcaaacctggcccaccaccaccaaagcccgcagagcggcataaggacgacagcaggggtcttgtgcttcctgggtacaagtacctcggacccttcaacggactcgacaagggagagccggtcaacgaggcagacgccgcggccctcgagcacgacaaagcctacgaccggcagctcgacagcggagacaacccgtacctcaagtacaaccacgccgacgcggagtttcaggagcgccttaaagaagatacgtcttttgggggcaacctcgggcgagcagtcttccaggccaagaagagggttctcgaaccttttggtctggttgaggaaggtgctaagacggctcctggaaagaaacgtccggtagagcagtcgccacaagagccagactcctcctcgggcattggcaagacaggccagcagcccgctaaaaagagactcaattttggtcagactggcgactcagagtcagtccccgacccacaacctctcggagaacctccagcaacccccgctgctgtgggacctactacaatggcttcaggcggtggcgcaccaatggcagacaataacgaaggcgccgacggagtgggtaatgcctcaggaaattggcattgcgattccacatggctgggcgacagagtcatcaccaccagcacccgaacatgggccttgcccacctataacaaccacctctacaagcaaatctccagtgcttcaacgggggccagcaacgacaaccactacttcggctacagcaccccctgggggtattttgacttcaacagattccactgccacttctcaccacgtgactggcagcgactcatcaacaacaactggggattccggcctaagcgactcaacttcaagctcttcaacattcaggtcaaagaggttacggacaacaatggagtcaagaccatcgccaataaccttaccagcacggtccaggtcttcacggactcagactatcagctcccgtacgtgctcgggtcggctcacgagggctgcctcccgccgttcccagcggacgttttcatgattcctcagtacggctacctaacactcaacaacggtagtcaggccgtgggacgctcctccttctactgcctggaatactttccttcgcagatgctgagaaccggcaacaacttccagtttacttacaccttcgaggacgtgcctttccacagcagctacgcgcacagccagagtctggaccggctgatgaatcctctgattgaccagtacctgtactacttgtctcggactcaaacaacaggaggcacggcaaatacgcagactctgggcttcagccaaggtgggcctaatacaatggccaatcaggcaaagaactggctgccaggaccctgttaccgccaacaacgcgtctcaacgacaaccgggcaaaacaacaatagcaactttgcctggactgctgggaccaaataccatctgaatggaagaaattcattggctaatcctggcatcgctatggcaacacacaaagacgacaaggagcgtttttttcccagtaacgggatcctgattttcggcaaacaaaatgctgccagagacaatgcggattacagcgatgtcatgctcaccagcgaggaagaaatcaaaaccactaaccctgtggctacagaggaatacggtatcgtggcagataacttgcagcagcaaaacacggctcctcaaattggaactgtcaacagccagggggccttacccggtatggtctggcagaaccgggacgtgtacctgcagggtcccatctgggccaagattcctcacacggacggcaacttccacccgtctccgctgatgggcggctttggcctgaaacatcctccgcctcagatcctgatcaagaacacgcctgtacctgcggatcctccgaccaccttcaaccagtcaaagctgaactctttcatcacgcaatacagcaccggacaggtcagcgtggaaattgaatgggagctgcagaaggaaaacagcaagcgctggaaccccgagatccagtacacctccaactactacaaatctacaagtgtggactttgctgttaatacagaaggcgtgtactctgaaccccaccccattggcaccagatacctgactcgtaatctgtaa

SEQ ID NO: 1088 - DNA, 2208 bp, Artificial Sequence
  source: /note="Description of Artificial Sequence: Synthetic polynucleotide"
atggctgccgatggttatcttccagattggctcgaggacactctctctgaaggaataagacagtggtggaagctcaaacctggcccaccaccaccaaagcccgcagagcggcataaggacgacagcaggggtcttgtgcttcctgggtacaagtacctcggacccttcaacggactcgacaagggagagccggtcaacgaggcagacgccgcggccctcgagcacgacaaagcctacgaccggcagctcgacagcggagacaacccgtacctcaagtacaaccacgccgacgcggagtttcaggagcgccttaaagaagatacgtcttttgggggcaacctcggacgagcagtcttccaggcgaaaaagagggttcttgaacctctgggcctggttgaggaacctgttaagacggctccgggaaaaaagaggccggtagagcagtcgccacaagagccagactcctcctcgggcatcggcaagaaaggccagcagcccgctaaaaagagactcaattttggtcagactggcgactcagagtcagtccccgacccacaacctctcggagaacctccagcaacccccgctgctgtgggacctactacaatggcttcaggcggtggcgcaccaatggcggacaataacgaaggcgccgatggagtgggtaatgcctcaggaaattggcattgcgattccacatggctgggcgacagagtcatcaccaccagcacccgaacatgggccttgcccacctataacaaccacctctacaagcaaatctccagtgcttcaacgggggccagcaacgacaaccactacttcggctacagcaccccctgggggtattttgacttcaacagattccactgccacttctcaccacgtgactggcagcgactcatcaacaacaactggggattccggcctaagcgactcaacttcaagctcttcaacattcaggtcaaagaggttacggacaacaatggagtcaagaccatcgccaataaccttaccagcacggtccaggtcttcacggactcagactatcagctcccgtacgttctcggctctgcccaccagggctgcctgcctccgttcccggcggacgtgttcatgattccccagtacggctacctaacactcaacaacggtagtcaggccgtgggacgctcctccttctactgcctggaatactttccttcgcagatgctgagaaccggcaacaacttccagtttacttacaccttcgaggacgtgcctttccacagcagctacgcccacagccagagcttggaccggctgatgaatcctctgattgaccagtacctgtactacttgtctcggactcaaacaacaggaggcacggcaaatacgcagactctgggcttcagccaaggtgggcctaatacaatggccaatcaggcaaagaactggctgccaggaccctgttaccgccaacaacgcgtctcaacgacaaccgggcaaaacaacaatagcaactttgcctggactgctgggaccaaataccatctgaatggaagaaattcattggctaatcctggcatcgctatggcaacacacaaagacgacaaggagcgtttttttcccagtaacgggatcctgatttttggcaaacaaaatgctgccagagacaatgcggattacagcgatgtcatgctcaccagcgaggaagaaatcaaaaccactaaccctgtggctacagaggaatacggtatcgtggcagataacttgcagcagcaaaacacggctcctcaaattggaactgtcaacagccagggggccttacccggtatggtctggcagaaccgggacgtgtacctgcagggtcccatctgggccaagattcctcacacggacggcaacttccacccgtctccgctgatgggcggctttggcctgaaacatcctccgcctcagatcctgatcaagaacacgcctgtacctgcggatcctccgaccaccttcaaccagtcaaagctgaactctttcatcacgcaatacagcaccggacaggtcagcgtggaaattgaatgggagctgcagaaggaaaacagcaagcgctggaaccccgagatccagtacacctccaactactacaaatctacaagtgtggactttgctgttaatacagaaggcgtgtactctgaaccccaccccattggcacccgttacctcacccgtcccctg

SEQ ID NO: 1089 - DNA, 2211 bp, Artificial Sequence
  source: /note="Description of Artificial Sequence: Synthetic polynucleotide"
atggctgccgatggttatcttccagattggctcgaggacactctctctgaaggaataagacagtggtggaagctcaaacctggcccaccaccaccaaagcccgcagagcggcataaggacgacagcaggggtcttgtgcttcctgggtacaagtacctcggacccttcaacggactcgacaagggagagccggtcaacgaggcagacgccgcggccctcgagcacgacaaagcctacgaccagcagctccaagcgggtgacaatccgtacctgcggtataaccacgccgacgccgagtttcaggagcgtcttcaaggagatacgtcttttgggggcaacctcggacgagcagtcttccaggccaaaaagaggcttcttgaacctcttggtctggttgaggaagcggctaagacggctcctggaaagaagaggcctgtagagcagtctcctcaggaaccggactcctccgcgggtattggcaaatcgggtgcacagcccgctaaaaagagactcaatttcggtcagactggcgacacagagtcagtcccagaccctcaaccaatcggagaacctcccgcagccccctcaggtgtgggatctcttacaatggcttcaggtggtggcgcaccagtggcagacaataacgaaggtgccgatggagtgggtagttcctcgggaaattggcattgcgattcccaatggctgggggacagagtcatcaccaccagcacccgaacatgggccttgcccacctataacaaccacctctacaagcaaatctccagtgcttcaacgggggccagcaacgacaaccactacttcggctacagcaccccctgggggtattttgacttcaaccgcttccactgccacttctcaccacgtgactggcagcgactcatcaacaacaactggggattccggcccaagagactcagcttcaagctcttcaaccatccaggtcaaggaggtcacgcagaatgaaggcaccaagaccatcgccaataacctcaccagcacatccaggtgtttacggactcggagtaccagctgccgtacgttctcggctctgcccaccagggctgcctgcctccgttcccggcggacgtgttcatgattccccagtacggctacctaacactcaacaacggtagtcaggccgtgggacgctcctccttctactgcctggaatactttccttcgcagatgctgagaaccggcaacaacttccagttcacttacaccttcgaggacgtgcctttccacagcagctacgcgcacagccagagcttggaccggctgatgaatcctctgattgaccagtacctgtactacttgtctcggactcaaacaacaggaggcacggcaaatacgcagactctgggcttcagccaaggtgggcctaatacaatggccaatcaggcaaagaactggctgccaggaccctgttaccgccaacaacgcgtctcaacgacaaccgggcaaaacaacaatagcaactttgcctggactgctgggaccaaataccatctgaatggaagaaattcattgggtaatcctggcatcgctatggcaacacacaaagacgacaaggagcgtttttttcccagtaacgggatcctgatttttggcaaacaaaatgctgccagagacaatgcggattacagcgatgtcatgctcaccagcgaggaagaaatcaaaaccactaaccctgtggctacagaggaatacggtatcgtggcagataacttgcagcagcaaaacacggctcctcaaattggaactgtcaacagccagggggccttacccggtatggtctggcagaaccgggacgtgtacctgcagggtcccatctgggccaagattcctcacacggacggcaacttccacccgtctccgctgatgggcggctttggcctgaaacatcctccgcctcagatcctcatcaaaaacacacctgtacctgcggatcctccaacggccttcaaccagtcaaagctgaactctttcatcacgcaatacagcaccggacaggtcagcgtggaaattgaatgggagctgcagaaggaaaacagcaagcgctggaaccccgagatccagtacacctccaactactacaaatctacaagtgtggactttgctgttaatacagaaggcgtgtactctgaaccccaccccattggcacccgttacctcacccgtcccctgtaa

SEQ ID NO: 1090 - DNA, 2214 bp, Artificial Sequence
  source: /note="Description of Artificial Sequence: Synthetic polynucleotide"
atggctgccgatggttatcttccagattggctcgaggacaacctctctgagggcattcgcgagtggtgggacttgaaacatggagccccgaaacccaaagccaaccagcaaaagcaggacgacggccggggtctggtgcttcctggctacaagtacctcggacccttcaacggactcgacaagggggagcccgtcaacgcggcggatgcagcggccctcgagcacgacaaggcctacgaccagcagctcaaagcgggtgacaatccgtacctgcggtataaccacgccgacgccgagtttcaggagcgtctgcaagaagatacgtcttttgggggcaacctcgggcgagcagtcttccaggccaagaagagggttctcgaaccttttggtctggttgaggaaggtgctaagacggctcctggaaagaaacgtccggtagagcagtcgccacaagagccagactcctcctcgggcattggcaagacaggccagcagcccgctaaaaagagactcaattttggtcagactggcgactcagagtcagtccccgacccacaacctctcggagaacctccagcaacccccgctgctgtgggacctactacaatggcttcaggcggtggcgcaccaatggcagacaataacgaaggcgccgacggagtgggtaatgcctcaggaaattggcattgcgattccacatggctgggcgacagagtcatcaccaccagcacccgaacatgggccttgcccacctataacaaccacctctacaagcaaatctccaacgggacttcgggaggaagcaccaacgacaacacctacttcggctacagcaccccctgggggtattttgactttaacagattccactgccacttctcaccacgtgactggcagcgactcatcaacaacaactggggattccggcccaagagactcaacttcaaactcttcaacatccaagtcaaggaggtcacgcagaatgaaggcaccaagaccatcgccaataacctcaccagcaccatccaggtgtttacggactcggagtaccagctgccgtacgttctcggctccgcccaccagggctgcctgcctccgttcccggcggacgtgttcatgattccccagtacggctacctaacactcaacaacggtagtcaggccgtgggacgctcctccttctactgcctggaatactttccttcgcagatgctgagaacgggcaacaactttaccttcagctacacctttgaggacgttcctttccacagcagctacgctcacagccagagtctggaccgtctcatgaatcctctgattgaccagtacctgtactacttgtctcggactcaaacaacaggaggcacggcaaatacgcagactctgggcttcagccaaggtgggcctaatacaatggccaatcaggcaaagaactggctgccaggaccctgttaccgccaacaacgcgtctcaacgacaaccgggcaaaacaacaatagcaactttgcctggactgctgggaccaaataccatctgaatggaagaaattcattggctaatcctggcatcgctatggcaacacacaaagacgacaaggagcgtttttttcccagtaacgggatcctgatttttggcaaacaaaatgctgccagagacaatgcggattacagcgatgtcatgctcaccagcgaggaagaaatcaaaaccactaaccctgtggctacagaggaatacggtatcgtggcagataacttgcagcagcaaaacacggctcctcaaattggaactgtcaacagccagggggccttacccggtatggtctggcagaaccgggacgtgtacctgcagggtcccatctgggccaagattcctcacacggacggcaacttccacccgtctccgctgatgggcggctttggcctgaaacatcctccgcctcagatcctgatcaagaacacgcctgtacctgcggatcctccgaccaccttcaaccagtcaaagctgaactctttcatcacgcaatacagcaccggacaggtcagcgtggaaattgaatgggagctgcagaaggaaaacagcaagcgctggaaccccgagatccagtacacctccaactactacaaatctacaagtgtggactttgctgttaatacagaaggcgtgtactctgatccccaccccattggcacccgttacctcacccgtcccctgtaa

SEQ ID NO: 1091 - DNA, 2214 bp, Artificial Sequence
  source: /note="Description of Artificial Sequence: Synthetic polynucleotide"
atggctgccgatggttatcttccagattggctcgaggacaacctctctgagggcattcgcgagtggtgggcgctgaaacctggagccccgaagcccaaagccaaccagcaaaagcaggacgacggccggggtctggtgcttcctggctacaagtacctcggacccttcaacggactcgacaaaggagagccggtcaacgaggcggacgcggcagccctcgaacacgacaaggcctacgaccagcagctcaaagcgggtgacaatccgtacctgcggtataaccacgccgacgccgagtttcaggagcgtctgcaagaagatacgtcttttgggggcaacctcgggcgagcagtcttccaggccaagaagcgggttctcgaacctctcggtctggttgaggaaggcgctaagacggctcctggaaagaagagaccggtagagccatcaccccagcgttctccagactcctctacgggcatcggcaagaaaggccagcagcccgccagaaaaagactcaattttggtcagactggcgactcagagtcagttccagaccctcaacctctcggagaacctccagcagcgccctctggtgtgggacctaatacaatggcttcaggcggtggcgcaccaatggcagacaataacgagggcgccgacggagtgggtaattcctcgggaaattggcattgcgattccacatggatgggcgacagagtcatcaccaccagcacccgaacctgggccctgcccacctacaacaaccacctctacaagcaaatctccagtgcttcaacgggggccagcaacgacaaccactacttcggctacagcaccccctgggggtattttgactttaacagattccactgccacttttcaccacgtgactggcagcgactcatcaacaacaactggggattccggcccaagagactcaacttcaagctcttcaacatccaagtcaaggaggtcacgcagaatgaaggcaccaagaccatcgccaataacctcaccagcaccatccaggtgtttacggactcggagtaccagctgccgtacgttctcggctctgcccaccagggctgcctgcctccgttcccggcggacgtgttcatgattccccagtacggctacctaacactcaacaacggtagtcaggccgtgggacgctcctccttctactgcctggaatactttccttcgcagatgctgagaaccggcaacaacttccagtttacttacaccttcgaggacgtgcctttccacagcagctacgcgcacagccagagcttggaccggctgatgaatcctctgattgaccagtacctgtactacttgtctcggactcaaacaacaggaggcacggcaaatacgcagactctgggcttcagccaaggtgggcctaatacaatggccaatcaggcaaagaactggctgccaggaccctgttaccgccaacaacgcgtctcaacgacaaccgggcaaaacaacaatagcaactttgcctggactgctgggaccaaataccatctgaatggaagaaattcattggctaatcctggcatcgctatggcaacacacaaagacgacaaggagcgtttttttcccagtaacgggatcctgatttttggcaaacaaaatgctgccagagacaatgcggattacagcgatgtcatgctcaccagcgaggaagaaatcaaaaccactaaccctgtggctacagaggaatacggtatcgtggcagataacttgcagcagcaaaacacggctcctcaaattggaactgtcaacagccagggggccttacccggtatggtctggcagaaccgggacgtgtacctgcagggtcccatctgggccaagattcctcacacggacggcaacttccacccgtctccgctgatgggcggctttggcctgaaacatcctccgcctcagatcctgatcaagaacacgcctgtacctgcggatcctccgaccaccttcaaccagtcaaagctgaactctttcatcacacaatacagcaccggacaggtcagcgtggaaattgaatgggagctgcagaaggaaaacagcaagcgctggaaccccgagatccagtacacctccaactactacaaatctacaagtgtggactttgctgttaatacagaaggcgtgtactctgaaccccaccccattggcacccgttacctcacccgtcccctgtaa

SEQ ID NO: 1092 - DNA, 2211 bp, Artificial Sequence
  source: /note="Description of Artificial Sequence: Synthetic polynucleotide"
  modified_base (676)..(676): a, c, t, or g
atggctgccgatggttatcttccagattggctcgaggacactctctctgaaggaataagacagtggtggaagctcaaacctggcccaccaccaccaaagcccgcagagcggcataaggacgacagcaggggtcttgtgcttcctgggtacaagtacctcggacccttcaacggactcgacaagggagagccggtcaacgaggcagacgccgcggccctcgagcacgacaaagcctacgaccggcagctcgacagcggagacaacccgtacctcaagtacaaccacgccgacgcggagtttcaggagcgccttaaagaagatacgtcttttgggggcaacctcggacgagcagtcttccaggcgaaaaagagggttcttgaacctctgggcctggttgaggaacctgttaagacggctccgggaaaaaagaggccggtagagcagtcgccacaagagccagactcctcctcgggcatcggcaagaaaggccagcagcccgctaaaaagagactcaattttggtcagactggcgactcagagtcagtccccgacccacaacctctcggagaacctccagcaacccccgctgctgtgggacctactacaatggcttcaggcggtggcgcaccaatggcggacaataacgaaggcgccgatggagtgggtaatgcctcangaaattggcattgcgattccacatggctgggcgacagagtcatcaccaccagcacccgaacatgggccttgccacctataacaaccacctctacaagcaaatctccagtgcttcaacgggggcgcagcaacgacaaccactacttcggctacagcaccccctgggggtattttgacttcaacagattccactgccacttctcaccacgtgactggcagcgactcatcaacaacaactggggattccggcctaagcgactcaacttcaagctcttcaacattcaggtcaaagaggttacggacaacaatggagtcaagaccatcgccaataaccttaccagcacggtccaggtcttcacggactcagactatcagctcccgtacgttctcggctctgcccaccagggctgcctgcctccgttcccggcggacgtgttcatgattccccagtacggctacctaacactcaacaacggtagtcaggccgtgggacgctcctccttctactgcctggaatactttccttcgcagatgctgagaaccggcaacaacttccagtttacttacaccttcgaggacgtgcctttccacagcagctacgcccacagccagagcttggaccggctgatgaatcctctgattgaccagtacctgtactacttgtctcggactcaaacaacaggaggcacggcaaatacgcagactctgggcttcagccaaggtgggcctaatacaatggccaatcaggcaaagaactggctgccaggaccctgttaccgccaacaacgcgtctcaacgacaaccgggcaaaacaacaatagcaactttgcctggactgctgggaccaaataccatctgaatggaagaaattcattggctaatcctggcatcgctatggcaacacacaaagacgacaaggagcgtttttttcccagtaacgggatcctgatttttggcaaacaaaatgctgccagagacaatgcggattacagcgatgtcatgctcaccagcgaggaagaaatcaaaaccactaaccctgtggctacagaggaatacggtatcgtggcagataacttgcagcagcaaaacacggctcctcaaattggaactgtcaacagccagggggccttacccggtatggtttggcagaaccgggacgtgtacctgcagggtcccatctgggccaagattcctcacacggacggcaacttccacccgtctccgctgatgggcggctttggcctgaaacatcctccgcctcagatcctgatcaagaacacgcctgtacctgcggatcctccgaccaccttcaaccagtcaaagctgaactctttcatcacacagtactccacgggacaggtcagcgtggaaattgaatgggagctgcagaaggaaaacagcaagcgctggaacccggagatccagtacacttccaactactacaaatctacaaatgtggactttgctgttaacacagaaggcgtgtactctgaaccccaccccattggcacccgttacctcacccgtcccctgtaa

SEQ ID NO: 1093 - DNA, 2211 bp, Artificial Sequence
  source: /note="Description of Artificial Sequence: Synthetic polynucleotide"
  modified_base (715)..(715): a, c, t, or g
atggctgccgatggttatcttccagattggctcgaggacaacctctctgagggcattcgcgagtggtgggacttgaaacctggagccccgaaacccaaagccaaccagcaaaagcaggacgacggccggggtctggtgcttcctggctacaagtacctcggacccttcaacggactcgacaagggggagcccgtcaacgcggcggatgcagcggccctcgagcacgacaaggcctacgaccagcagctccaagcgggtgacaatccgtacctgcggtataaccacgccgacgccgagtttcaggagcgtcttcaaggagatacgtcttttgggggcaacctcggacgagcagtcttccaggccaagaagcgggttctcgaacctctcggtctggttgaggaagcggctaagacggctcctggaaagaagaggcctgtagagcagtctcctcaggaaccggactcctccgcgggtattggcaaatcgggtgcacagcccgctaaaaagagactcaatttcggtcagactggcgacacagagtcagtcccagaccctcaaccaatcggagaacctcccgcagccccctctggtgtgggacctaatacaatggctgcaggcggtggcgcaccaatggcagacaataacgaaggcgccgatggagtgggtagttcctcgggaaattggcattgcgattccacatggctgggcgacagantcatcaccaccagcacccgaacctgggccctgcccacctataacaaccatctctacaagcaaatctccagtgcttcaacgggggccagcaacgacaaccactacttcggctacagcaccccctgggggtattttgacttcaacagattccactgccacttctcaccacgtgactggcagcgactcatcaacaacaactggggattccggcctaagcgactcaacttcaagctcttcaacattcaggtcaaagaggttacggacaacaatggagtcaagaccatcgccaataaccttaccagcacggtccaggtcttcacggactcggagtaccagttgccgtacgtcctcggctctgcgcaccagggctgcctgcctccgttcccggcggacgtgttcatgattccgcagtacggctacctaacgctcaacaatggcagccaggcagtgggacggtcatccttttactgcctggaatatttcccatcgcagatgctgagaacgggcaacaactttaccttcagctacacttttgaggacgttcctttccacagcagctacgctcacagccagagtctggaccgtctcatgaatcctctgattgaccagtacctgtactacttgtctcggactcaaacaacaggaggcacggcaaatacgcagactctgggcttcagccaaggtgggcctaatacaatggccaatcaggcaaagaactggctgccaggaccctgttaccgccaacaacgcgtctcaacgacaaccggacaaaacaacaatagcaactttgcctggactgctgggaccaaataccatctgaatggaagaaattcattggctaatcctggcatcgctatggcaacacacaaagacgacaaggagcgtttttttcccagtaacgggatcctgatttttggcaaacaaaatgctgccagagacaatgcggattacagcgatgtcatgctcaccagcgaggaagaaatcaaaaccactaaccctgtggctacagaggaatacggtatcgtggcagataactttcagcagcaaaacacggctcctcaaattggaactgtcaacagccagggggccttacccggtatggtctggcagaaccgggacgtgtacctgcagggtcccatctgggccaagattcctcacacggacggcaacttccacccgtctccgctgatgggcggctttggcctgaaacatcctccgcctcagatcctgatcaagaacacgcctgtacctgcggatcctccgaccaccttcaaccagtcaaagctgaactctttcatcacgcaatacagcaccggacaggtcagcgtggaaattgaatgggagctgcagaaggaaaacagcaagcgctggaaccccgagatccagtacacctccaactactacaaatctacaagtgtggactttgctgttaatacagaaggcgtgtactctgaaccccaccccattggcacccgttacctcacccgtcccctgtaa

SEQ ID NO: 1094 - DNA, 2211 bp, Artificial Sequence
  source: /note="Description of Artificial Sequence: Synthetic polynucleotide"
atggctgccgatggttatcttccagattggctcgaggacaacctctctgagggcattcgcgagtggtgggcgctgaaacctggagccccgaagcccaaagccaaccagcaaaagcaggacgacggccggggtctggtgcttcctggctacaagtacctcggacccttcaacggactcgacaaaggagagccggtcaacgaggcggacgcggcagccctcgaacacgacaaagcttacgaccagcagctcaaggccggtgacaacccctacctcaagtataaccacgccgacgccgagtttcaggagcgtctgcaagaagatacgtcttttgggggcaacctcgggcgagcagtcttccaggccaaaaagaggcttcttgaacctcttggtctggttgaggaagcggctaagacggctcctggaaagaagaggcctgtagagcagtctcctcaggaaccggactcctccgcgggtattggcaaatcgggtgcacagcccgctaaaaagagactcaatttcggtcagactggcgacacagagtcagtcccagacccacaacctctcggagaacctccagcaacccccgctgctgtgggacctactacaatggcttcaggcggtggcgcaccaatggcggacaataacgaaggcgccgatggagtgggtaatgcctcaggaaattggcattgcgattccacatggctgggcgacagagtcatcaccaccagcacccgaacatgggccttgcccacctataacaaccacctctacaagcaaatctccagtgcttcaacgggggccagcaacgacaaccactacttcggctacagcaccccctgggggtattttgacttcaacagattccactgccacttctcaccacgtgactggcagcgactcatcaacaacaactggggattccggcccaagagactcagcttcaagctcttcaacatccaggtcaaggaggtcacgcagaatgaaggcaccaagaccatcgccaataacctcaccagcaccatccaggtgtttacggactcggagtaccagctgccgtacgttctcggctccgcccaccagggctgcctgcctccgttcccggcggacgtgttcatgattccccagtacggctacctaacactcaacaacggtagtcaggccgtgggacgctcctccttctactgcctggaatactttccttcgcagatgctgagaaccggcaacaacttccagtttacttacaccttcgaggacgtgcctttccacagcagctacgcccacagccagagcttggaccggctgatgaatcctctgattgaccagtacctgtactacttgtctcggactcaaacaacaggaggcacggcaaatacgcagactctgggcttcagccaaggtgggcctaatacaatggccaatcaggcaaagaactggctgccaggaccctgttaccgccaacaacgcgtctcaacgacaaccgggcaaaacaacaatagcaactttgcctggactgctgggaccaaataccatctgaatggaagaaattcattggctaatcctggcatcgctatggcaacacacaaagacgacaaggagcgtttttttcccagtaacgggatcctgatttttggcaaacaaaatgctgccagagacaatgcggattacagcgatgtcatgctcaccagcgaggaagaaatcaaaaccactaaccctgtggctacagaggaatacggtatcgtggcagataacttgcagcagcaaaacacggctcctcaaattggaactgtcaacagccagggggccttacccggtatggtctggcagaaccgggacgtgtacctgcagggtcccatctgggccaagattcctcacacggacggcaacttccacccgtctccgctgatgggcggctttggcctgaaacatcctccgcctcagatcctgatcaagaacacgcctgtacctgcggatcctccgaccaccttcaaccagtcaaagctgaactctttcatcacgcaatacagcaccggacaggtcagcgtggaaattgaatgggagctgcagaaggaaaacagcaagcgctggaaccccgagatccagtacacctccaactactacaaatctacaagtgtggactttgctgttaatacagaaggcgtgtactctgaaccccaccccattggcacccgttacctcacccgtcccctgtaa

SEQ ID NO: 1095 - DNA, 2211 bp, Artificial Sequence
  source: /note="Description of Artificial Sequence: Synthetic polynucleotide"
atggctgccgatggttatcttccagattggctcgaggacactctctctgaaggaataagacagtggtggaagctcaaacctggcccaccaccaccaaagcccgcagagcggcataaggacgacagcaggggtcttgtgcttcctgggtacaagtacctcggacccttcaacggactcgacaagggagagccggtcaacgaggcagacgccgcggccctcgagcacgacaaagcctacgaccagcagctccaagcgggtgacaatccgtacctgcggtataaccacgccgacgccgagtttcaggagcgtcttcaaggagatacgtcttttgggggcaacctcggacgagcagtcttccaggccaaaaagaggcttcttgaacctcttggtctggttgaggaagcggctaagacggctcctggaaagaagaggcctgtagagcagtctcctcaggaaccggactcctccgcgggtattggcaaatcgggtgcacagcccgctaaaaagagactcaatttcggtcagactggcgacacagagtcagtcccagaccctcaaccaatcggagaacctcccgcagccccctcaggtgtgggatctcttacaatggcttcaggtggtggcgcaccagtggcagacaataacgaaggtgccgatggagtgggtagttcctcgggaaattggcattgcgattcccaatggctgggggacagagtcatcaccaccagcacccgaacatgggccttgcccacctataacaaccacctctacaagcaaatctccagtgcttcaacgggggccagcaacgacaaccactacttcggctacagcaccccctgggggtattttgacttcaaccgcttccactgccacttctcaccacgtgactggcagcgactcatcaacaacaactggggattccggcccaagagactcagcttcaagctcttcaacatccaggtcaaggaggtcacgcagaatgaaggcaccaagaccatcgccaataacctcaccagcaccatccaggtgtttacggactcggagtaccagctgccgtacgttctcggctctgcccaccagggctgcctgcctccgttcccggcggacgtgttcatgattccccagtacggctacctaacactcaacaacggtagtcaggccgtgggacgctcctccttctactgcctggaatactttccttcgcagatgctgagaaccggcaacaacttccagtttacttacaccttcgaggacgtgcctttccacagcagctacgcccacagccagagcttggaccggctgatgaatcctctgattgaccagtacctgtactacttgtctcggactcaaacaacaggaggcacggcaaatacgcagactctgggcttcagccaaggtgggcctaatacaatggccaatcaggcaaagaactggctgccaggaccctgttaccgccaacaacgcgtctcaacgacaaccgggcaaaacaacaatagcaactttgcctggactgctgggaccaaataccatctgaatggaagaaattcattggctaatcctggcatcgctatggcaacacacaaagacgacaaggagcgtttttttcccagtaacgggatcctgatttttggcaaacaaaatgctgccagagacaatgcggattacagcgatgtcatgctcaccagcgaggaagaaatcaaaaccactaaccctgtggctacagaggaatacggtatcgtggcagataacttgcagcagcaaaacacggctcctcaaattggaactgtcaacagccagggggccttacccggtatggtctggcagaaccgggacgtgtacctgcagggtcccatctgggccaagattcctcacacggacggcaacttccacccgtctccgctgatgggcggctttggcctgaaacatcctccgcctcagatcctgatcaagaacacgcctgtacctgcggatcctccgaccaccttcaaccagtcaaagctgaactctttcatcacgcaatacagcaccggacaggtcagcgtggaaattgaatgggagctgcagaaggaaaacagcaagcgctggaaccccgagatccagtacacctccaactactacaaatctacaagtgtggactttgctgttaatacagaaggcgtgtactctgaaccccaccccattggcacccgttacctcacccgtcccctgtaa

SEQ ID NO: 1096 - DNA, 2217 bp, Artificial Sequence
  source: /note="Description of Artificial Sequence: Synthetic polynucleotide"
atggctgccgatggttatcttccagattggctcgaggacaacctctctgagggaataagacagtggtggaagctcaaacctggcccaccaccaccaaagcccgcagagcggcataaggacgacagcaggggtcttgtgcttcctgggtacaagtacctcggacccttcaacggactcgacaagggagagccggtcaacgcggcggacgcagcggccctcgagcacgacaaggcctacgaccagcagctcaaagcgggtgacaatccgtacctgcggtataaccacgccgacgccgagtttcaggagcgtctgcaagaagatacgtcttttgggggcaacctcgggcgagcagtcttccaggccaagaagcgggttctcgaacctctcggtctggttgaggaaggcgctaagacggctcctggaaagaagagaccggtagagccatcaccccagcgttctccagactcctctacgggcatcggcaagaaaggccagcagcccgctaaaaagagactcaattttggtcagactggcgactcagagtcagtccccgacccacaacctctcggagaacctccagcaacccccgctgctgtgggacctactacaatggcttcaggcggtggcgcaccaatggcagacaataacgaaggcgccgacggagtgggtaatgcctcaggaaattggcattgcgattccacatggctgggggacagagtcatcaccaccagcacccgaacctgggccctgcccacctacaacaaccacctctacaagcaaatctccaacgggacttcgggaggaagcaccaacgacaacacctacttcggctgcgtcacgccctgggggtattttgactttaacaaattccactgccacttttcaccggatgactggcaacgactcatcaacaacggctggggattccggactaagcgactcaacttcaagctcttcagcatgaaagtcaaaaagggtacggacaacactggaatcaagaccatcgcgaataaccttaccaacacggtccatgtcttcgcggactcggagtaccagttgccgtacgtcctcggctctgcgcaccagggctgcctccctccgttcccggcggacgtgttcatgattccgcagtacggctacctaacgctcaacaatggcagccaggcagtgggacggtcatccttttactgcctggaatatttcccatcgcagatgctgagaacgggcaacaactttaccttcagctacacctttgaggacgttcctttccacagcagctacgctcacagccagagtctggaccgtctcatgaatcctctgattgaccagtacctgtactacttgtctcggactcaaacaacaggaggcacggcaaatacgcagactctgggcttcagccaaggtgggcctaatacaatggccaatcaggcaaagaactggctgccaggaccctgttaccgccaacaacgcgtctcaacgacaaccgggcaaaacaacaatagcaactttgcctggactgctgggaccaaataccatctgaatggaagaaattcattggctaatcctggcatcgctatggcaacacacaaagacgacaaggagcgtttttttcccagtaacgggatcctgatttttggcaaacaaaatgctgccagagacaatgcggattacagcgatgtcatgctcaccagcgaggaagaaatcaaaaccactaaccctgtggctacagaggaatacggtatcgtggcagataacttgcagcagcaaaacacggctcctcaaattggaactgtcaacagccagggggccttacccggtatggtctggcagaaccgggacgtgtacctgcagggtcccatctgggccaagattcctcacacggacggcaacttccacccgtctccgctgatgggcggctttggcctgaaacatcctccgcctcagatcctgatcaagaacacgcctgtacctgcggatcctccgaccaccttcaaccagtcaaagctgaactctttcatcacgcaatacagcaccggacaggtcagcgtggagatcgagtgggagctgcagaaggaaaacagcaagcgctggaacccggagatccagtacacctccaactactacaaatctacaagtgtggactttgctgttaatacagaaggcgtgtactctgaaccccaccccattggcacccgttacctcacccgtcccctgtaa

SEQ ID NO: 1097 - DNA, 2214 bp, Artificial Sequence
  source: /note="Description of Artificial Sequence: Synthetic polynucleotide"
atggctgccgatggttatcttccagattggctcgaggacactctctctgaaggaataagacagtggtggaagctcaaacctggcccaccaccaccaaagcccgcagagcggcataaggacgacagcaggggtcttgtgcttcctgggtacaagtacctcggacccttcaacggactcgacaagggggagcccgtcaacgcggcggacgcagcggccctcgagcacgacaaggcctacgaccagcagctcaaagcgggtgacaatccgtacctgcggtataaccacgccgacgccgagtttcaggagcgtctgcaagaagatacgtcttttgggggcaacctcgggcgagcagtcttccaggccaagaagcgggttctcgaacctctcggtctggttgaggaaggcgctaagacggctcctggaaagaagagaccggtagagccatcaccccagcgttctccagactcctctacgggcatcggcaagaaaggccagcagcccgcgaaaaagagactcaactttgggcagactggcgactcagagtcagtgcccgaccctcaaccaatcggagaaccccccgcaggcccctctggtctgggatctggtacaatggctgcaggcggtggcgctccaatggcagacaataacgaaggcgccgatggagtgggtagttcctcgggaaattggcattgcgattccacatggctgggggacagagtcatcaccaccagcacccgaacctgggccctgcccacctacaacaaccacctctacaaacaaatttccagcgcttcaacgggagcctcgaacgacaatcactactttggctacagcaccccctgggggtattttgacttcaacagattccactgccacttctcaccacgtgactggcagcgactcatcaacaacaactggggattccggcctaagcgactcaacttcaagctcttcaacattcaggtcaaagaggttacggacaacaatggagtcaagaccatcgccaataaccttaccagcacggtccaggtcttcacggactcggagtaccagttgccgtacgtcctcggctctgcgcaccagggctgcctccctccgttcccggcggacgtgttcatgattccgcagtacggctacctaacgctcaacaatggcagccaggcagtgggacggtcatccttttactgcctggaatatttcccatcgcagatgctgagaacgggcaacaactttaccttcagctacacctttgaggacgttcctttccacagcagctacgctcacagccagagtctggaccgtctcatgaatcctctgattgaccagtacctgtactacttgtctcggactcaaacaacaggaggcacggcaaatacgcagactctgggcttcagccaaggtgggcctaatacaatggccaatcaggcaaagaactggctgccaggaccctgttaccgccaacaacgcgtctcaacgacaaccgggcaaaacaacaatagcaactttgcctggactgctgggaccaaataccatctgaatggaagaaattcattggctaatcctggcatcgctatggcaacacacaaagacgacaaggagcgtttttttcccagtaacgggatcctgatttttggcaaacaaaatgctgccagagacaatgcggattacagcgatgtcatgctcaccagcgaggaagaaatcaaaaccactaaccctgtggctacagaggaatacggtatcgtggcagataacctgcagcagcaaaacacggctcctcaaattggaactgtcaacagccagggggccttacccggtatggtctggcagaaccgggacgtgtacctgcagggtcccatctgggccaagattcttcacacggacggcaactttcacccttctccgctgatgggagggtttggaatgaagcacccgcctcctccgatcctgatcaagaacacgcctgtacctgcggatcctccgaccaccttcaaccagtcaaagctgaactctttcatcacgcaatacagcaccggacaggtcagcgtggaaattgaatgggagctgccgaaggaaaacagcaagcgctggaaccccgagatccagtacacctccaactactacaaatctacaagtgtggactttgctgttaatacagaaggtgtgtactatgaaccccaccccattggcacccgttacctcacccctcccctgtaa

SEQ ID NO: 1098 - DNA, 2214 bp, Artificial Sequence
  source: /note="Description of Artificial Sequence: Synthetic polynucleotide"
atggctgccgatggttatcttccagattggctcgaggacaacctctctgagggcattcgcgagtggtgggcgctgaaacctggagccccgaagcccaaagccaaccagcaaaagcaggacgacggccggggtctggtgcttcctggctacaagtacctcggacccttcaacggactcgacaagggggagcccgtcaacgcggcggacgcagcggccctcgagcacgacaaggcctacgaccagcagctcaaagcgggtgacaatccgtacctgcggtataaccacgccgacgccgagtttcaggagcgtctgcaagaagatacgtcttttgggggcaacctcgggcgagcagtcttccaggccaagaagcgggttctcgaacctctcggtctggttgaggaaggcgctaagacggctcctggaaagaagagaccggtagagccatcaccccagcgctctccagactcctctacgggcatcggcaagaaaggccaacagcccgccagaaaaagactcaattttggtcagactggcgactcagagtcagttccagaccctcaacctctcggagaacctccagcagcgccctctggtgtggcacctaatacaatggctgcaggcggtggcgcaccaatggcagacaataacgaaggcgccgacggagtgggtaatgcctcaggaaattggcattgcgattccacatggctgggcgacagagtcatcaccaccagcacccgaacatgggccttgcccacctataacaaccacctctacaagcaaatctccagtgcttcaacgggggccagcaacgacaaccactacttcggctacagcaccccctgggggtattttgatttcaacagattccactgccacttttcaccacgtgactggcagcgactcatcacaacaattgggggattccggcctaagcgactcaacttcaagctcttcaacattcaggtcaaagaggttacggacaacaatggagtcaagaccatcgccaataaccttaccagcacggtccaggtcttcacggactcggagtaccagttgccgtacgtcctcggctctgcgcaccagggctgcctccctccgttcccggcggacgtgttcatgattccgcagtacggctacctaacgctcaacaatggcagccaggcagtgggacggtcatccttttactgcctggaatatttcccatcgcagatgctgagaacgggcaacaactttaccttcagctacacctttgaggacgttcctttccacagcagctacgctcacagccagagtctggaccggctgatgaatcctctgattgaccagtacctgtactacttgtctcggactcaaacaacaggaggcacggcaaatacgcagactctgggcttcagccaaggtgggcctaatacaatggccaatcaggcaaagaactggctgccaggaccctgttaccgccaacaacgcgtctcaacgacaaccgggcaaaacaacaatagcaactttgcctggactgctgggaccaaataccatctgaatggaagaaattcattggctaatcctggcatcgctatggcaacacacaaagacgacaaggagcgtttttttcccagtaacgggatcctgatttttggcaaacaaaatgctgccagagacaatgcggattacagcgatgtcatgctcaccagcgaggaagaaatcaaaaccactaaccctgtggctacagaggaatacggtatcgtggcagataacttgcagcagcaaaacacggctcctcaaattggaactgtcaacagccagggggccttacccggtatggtctggcagaaccgggacgtgtacctgcagggtcccatctgggccaagattcctcacacggacggcaacttccacccgtctccgctgatgggcggctttggcctgaaacatcctccgcctcagatcctgatcaagaacacgcctgtacctgcggatcctccgaccaccttcaaccagtcaaagctgaactctttcatcacgcaatacagcaccggacaggtcagcgtggaaattgaatgggagctgcagaaggaaaacagcaagcgctggaaccccgagatccagtacacctccaactactacaaatctacaagtgtggactttgctgttaatacagaaggcgtgtactctgaaccccaccccattggcacccgttacctcacccgtcccctgtaa

SEQ ID NO: 1099 - DNA, 2211 bp, Artificial Sequence
  source: /note="Description of Artificial Sequence: Synthetic polynucleotide"
atggctgccgatggttatcttccagattggctcgaggacactctctctgaaggaataagacagtggtggaagctcaaacctggcccaccaccaccaaagcccgcagagcggcataaggacgacggccggggtctggtgcttcctggctacaagtacctcggacccttcaacggactcgacaagggggagcccgtcaacgcggcggacgcagcggccctcgagcacgacaaggcctacgaccagcagctcaaagcgggtgacaatccgtacctgcggtataaccacgccgacgccgagtttcaggagcgtctgcaagaagatacgtcttttgggggcaacctcggacgagcagtcttccaggcgaaaaagagggttcttgaacctctgggcctggttgaggaacctgttaagacggctccgggaaaaaagaggccggtagagcagtcgccacaagagccagactcctcctcgggcatcggcaagaaaggccagcagcccgctaaaaagagactcaattttggtcagactggcgactcagagtcagtccccgacccacaacctctcggagaacctccagcaacccccgctgctgtgggacctactacaatggcttcaggcggtggcgcaccaatggcagacaataacgaaggcgccgacggagtgggtaatgcctcaggaaattggcattgcgattccacatggatgggcgacagagtcatcaccaccagcacccgaacatgggccttgcccacctataacaaccacctctacaagcaaatctccagtgcttcaacgggggccagcaacgacaaccactacttcggctacagcaccccctgggggtattttgactttaacagattccactgccacttttcaccacgtgactggcagcgactcatcaacaacaactggggattccggcctaagcgactcaacttcaagctcttcaacattcaggtcaaggaggtcacgcagaatgaaggcaccaagaccatcgccaataacctcaccagcaccatccaggtgtttacggactcggagtaccagctgccgtacgttctcggctccgcccaccagggctgcctgcctccgttcccggcggacgtgttcatgatcccccagtacggctacctaacactcaacaacggtagtcaggccgtgggacgctcctccttctactgcctggaatactttccttcgcagatgctgagaaccggcaacaacttccagtttacttacaccttcgaggacgtgcctttccacagcagctacgcgcacagccagagcttggaccggctgatgaatcctctgattgaccagtacctgtactacttgtctcggactcaaacaacaggaggcacggcaaatacgcagactctgggcttcagccaaggtgggcctaatacaatggccaatcacgcaaagaactggctgccaggaccctgttaccgccaacaacgcgtctcaacgacaaccgggcaaaacaacaatagcaactttgcctggactgctgggaccaaataccatctgaatggaagaaattcattggctaatcctggcatcgctatggcaacacacaaagacgacaaggagcgtttttttcccagtaacgggatcctgatttttggcaaacaaaatgctgccagagacaatgcggattacagcgatgtcatgctcaccagcgaggaagaaatcaaaaccactaaccctgtggctacagaggaatacggtatcgtggcagataacttgcagcagcaaaacacggctcctcaaattggaactgtcaacagccagggggccttacccggtatggtctggcagaaccgggacgtgtacctgcagggtcccatctgggccaagattcctcacacggacggcaacttccacccgtctccgctgatgggcggcttcggcctgaaacatcctccgcctcagatcctgatcaagaacacgcctgtacctgcggatcctccgaccaccttcaaccagtcaaagctgaactctttcatcacgcaatacagcaccggacaggtcagcgtggaaattgaatgggagctgcagaaggaaaacagcaagcgctggaaccccgagatccagtacacctccaactactacaaatctacaagtgtggactttgctgttaatacagaaggcgtgtactctgaaccccaccccattggcacccgttacctcacccgtcccctgtaa

SEQ ID NO: 1100 - DNA, 2214 bp, Artificial Sequence
  source: /note="Description of Artificial Sequence: Synthetic polynucleotide"
atggctgccgatggttatcttccagattggctcgaggacaacctctctcagggcattcgcgagtggtgggacttgaaacctggagccccgaaacccaaagccaaccagcaaaagcaggacgacggccggggtctggtgcttcctggctacaagtacctcggacccttcaacggactcgacaagggggagcccgtcaacgcggcggacgcagcggccctcgagcacgacaaggcctacgaccagcagctcaaagcgggtgacaatccgtacctgcggtataaccacgccgacgccgagtttcaggagcgtctgcaagaagatacgtcttttgggggcaacctcggacgagcagtcttccaggccaagaagcgggttctcgaacctctcggtctggttgaggaaggcgctaagacggctcctggaaagaagagaccggtagagccatcaccccagcgttctccagactcctctacgggcatcggcaagaaaggccaacagcccgccagaaaaagactcaattttggtcagactggcgactcagagtcagttccagaccctcaacctctcggagaacctccagcagcgcccgctgctgtgggacctactacaatggcttcaggcggtggcgcaccaatggcagacaataacgaaggcgccgacggagtgggtagttcctcgggaaattggcattgcgattcccaatggctgggggacagagtcatcaccaccagcacccgaacctgggccctgcccacctacaacaaccacctctacaagcaaatctccagtgcttcaacgggggccagcaacgacaaccactacttcggctacagcaccccctgggggtattttgacttcaacagattccactgccacttttcaccacgtgactggcaaagactcatcaacaacaactggggattccggcccaagagactcagcttcaagctcttcaacatccaggtcaaggaggtcacgcagaatgaaggcaccaagaccatcgccaataacctcaccagcaccatccaggtgtttacggactcggagtaccagctgccgtacgttctcggctctgcccaccagggctgcctgcctccgttcccggcggacgtgttcatgattccccagtacgggtacctgactctgaacaatggcagtcaggccgtgggccgttcctccttctactgcctggagtactttccttctcaaatgctgagaaccggcaacaacttccagtttacttacaccttcgaggacgtgcctttccacagcagctacgcccacagccagagcttggaccggctgatgaatcctctgattgaccagtacctgtactacttgtctcggactcaaacaacaggaggcacgacaaatgcgcagactctgggcttcagccaaggtgggcctaatacaatggccaatcaggcaaagaactggctgccaggaccctgttaccgccaacaacgcgtctcaacgacaaccgggcaaaacaacaatagcaactttgcctggactgctgggaccaaataccatctgaatggaagaaattcattggctaatcctggcatcgctatggcaacacacaaagacgacaaggagcgtttttttcccagtaacgggatcctgatttttggcaaacaaaatgctgccagagacaatgcggattacagcgatgtcatgctcaccagcgaggaagaaatcaaaaccactaaccctgtggctacagaggaatacggtatcgtggcagataacttgcagcagcaaaacacggctcctcaaattggaactgtcaacagccagggggccttacccggtatggtctggcagaaccgggacgtgtacctgcagggtcccatctgggccaagattcctcacacggacggcaacttccacccgtctccgctgatgggcggctttggcctgaaacatcctccgcctcagatcctgatcaagaacacgcctgtacctgcggatcctccgaccaccttcaaccagtcaaagctgaactctttcatcacacagtactccacgggacaggtcagcgtggaaattgaatgggagctgcagaaggaaaacagcaagcgctggaacccggagatccagtacacttccaactactacaaatctacaaatgtggactttgctgttaacacagaaggcgtgtactctgaaccccaccccattggcacccgttacctcacccgtcccctgtaa

SEQ ID NO: 1101 - DNA, 2211 bp, Artificial Sequence
  source: /note="Description of Artificial Sequence: Synthetic polynucleotide"
atggctgccgatggttatcttccagattggctcgaggacaacctctctgagggcattcgcgagtggtgggacttgaaacctggagccccgaaacccaaagccaaccagcaaaagcaggacgacggccggggtctggtgcttcctggctacaagtacctcggacccttcaacggactcgacaagggggagcccgtcaacgcggcggacgcagcggccctcgagcacgacaaggcctacgaccagcagctcaaagcgggtgacaatccgtacctgcggtataaccacgccgacgccgagtttcaggagcgtctgcaagaagatacgtcttttgggggcaacctcgggcgagcagtcttccaggccaagaagagggttctcgaaccttttggtctggttgaggaaggcgctaagacggctcctggaaagaaacgtccggtagagcagtcgccacaagagccagactcctcctcgggcatcggcaagacaggccagcagcccgctaaaaagagactcaatttcggtcagactggcgacacagagtcagtcccagaccctcaaccaatcggagaacctcccgcagccccctcaggtgtgggacctaatacaatggctgcaggcggtggcgcaccaatggcagacaataacgaaggcgccgacggagtgggtagttcctcgggaaattggcattgcgattccacatggatgggtgacagagtcatcaccaccagcacccgaacctgggccctgcccacctacaataaccacctctacaagcaaatctccagtgcttcaacgggggccagcaacgacaaccactacttcggctacagcaccccctgggggtattttgacttcaacagattccactgccacttctcaccacgtgactggcagcgactcatcaacaacaactggggattccggcctaagcgactcaacttcaagctcttcaacattcaggtcaaggaggtcacgcagaatgaaggcaccaagaccatcgccaataacctcaccagcaccatccaggtgtttacggactcggagtaccagctgccgtacgttctcggctctgcccaccagggctgcctgcctccgttcccggcggacgtgttcatgattccccagtacggctacctaacactcaacaacggtagtcaggccgtgggacgctcctccttctactgcctggaatactttccttcgcagatgctgagaaccggcaacaacttccagtttacttacaccttcgaggacgtgcctttccacagcagctacgcccacagccagagcttggaccggctgatgaatcctctgattgaccagtacctgtactacttgtctcggactcaaacaacaggaggcacggcaaatacgcagactctgggcttcagccaaggtgggcctaatacaatggccaatcaggcaaagaactggctgccaggaccctgttaccgccaacaacgcgtctcaacgacaaccgggcaaaacaacaatagcaactttgcctggactgctgggaccaaataccatctgaatggaagaaattcattggctaatcctggcatcgctatggcaacacacaaagacgacaaggagcgtttttttcccagtaacgggatcctgatttttggcaaacaaaatgctgccagagacaatgcggattacagcgatgtcatgctcaccagcgaggaagaaatcaaaaccactaaccctgtggctacagaggaatacggtatcgtggcagataacttgcagcagcaaaacacggctcctcaaattggaactgtcaacagccagggggccttacccggtatggtctggcagaaccgggacgtgtacctgcagggtcccatctgggccaagattcctcacacggacggcaacttccacccgtctccgctgatgggcggctttggcctgaaacatcctccgcctcagatcctgatcaagaacacgcctgtacctgcggatcctccgaccaccttcaaccagtcaaagctgaactctttcatcacacagtactccacgggacaggtcagcgtggaaattgaatgggagctgcagaaggaaaacagcaagcgctggaacccggagatccagtacacttccaactactacaaatctacaaatgtggactttgctgttaacacagaaggcgtgtactctgaaccccaccccattggcacccgttacttcacccgtcccctgtaa

SEQ ID NO: 1102 - DNA, 2211 bp, Artificial Sequence
  source: /note="Description of Artificial Sequence: Synthetic polynucleotide"
atggctgccgatggttatcttccagattggctcgaggacaacctctctgagggcattcgcgagtggtgggacttgaaacctggagccccgaaacccaaagccaaccagcaaaagcaggacgacggccggggtctggtgcttcctggctacaagtacctcggacccttcaacggactcgacaagggggagcccgtcaacgcggcggacgcagcggccctcgagcacgacaaggcctacgaccagcagctcaaagcgggtgacaatccgtacctgcggtataaccacgccgacgccgagtttcaggagcgtctgcaagaagatacgtcttttgggggcaacctcgggcgagcagtcttccaggccaagaagcgggttctcgaacctctcggtctggttgaggaaggcgctaagacggctcctggaaagaaacgtccggtagagcagtcgccacaagagccagactcctcctcgggcatcggcaagacaggccagcagcccgctaaaaaaagactcaattttggtcagactggcgactcagagtcagttccagaccctcaacctctcggagaacctccagcaacccccgctgctgtgggacctactacaatggcttcaggtggtggcgcaccaatggcagacaataacgagggcgccgacggagtgggtaattcctcgggaaattggcattgcgattccacatggatgggcgacagagtcatcaccaccagcacccgaacctgggccctgcccacctacaacaatcacctctacaagcaaatctccagtgcttcaacgggggccagcaacgacaaccactacttcggctacagcaccccctgggggtattttgacttcaacagattccactgccacttctcaccacgtgactggcagcgactcatcaacaacaactggggattccggcctaagcgactcaacttcaagctcttcaacattcaggtcaaagaggttacggacaacaatggagtcaagaccatcgccaataaccttaccagcacggtccaggtcttcacggactcggagtaccagttgccgtacgtcctcggctctgcgcaccagggctgcctccctccgttcccggcggacgtgttcatgattccgcagtacggctacctaacgctcaacaacggtagtcaggccgtgggacgctcctccttctactgcctggaatactttccttcgcagatgctgagaaccggcaacaacttccagtttacttacaccttcgaggacgtgcctttccacagcagctacgcccacagccagagcttggaccggctgatgaatcctctgattgaccagtacctgtactacttgtctcggactcaaacaacaggaggcacggcaaatacgcagactctgggcttcagccaaggtgggcctaatacaatggccaatcaggcaaagaactggctgccaggaccctgttaccgccaacaacgcgtctcgacgacaaccgggcaaaacaacaatagcaactttgcctggactgctgggaccaaataccatctgaatggaagaaattcattggctaatcctggcatcgctatggcaacacacaaagacgacaaggagcgtttttttcccagtaacgggatcctgatttttggcaaacaaaatgctgccagagacaatgcggattacagcgatgtcatgctcaccagcgaggaagaaatcaaaaccactaaccctgtggctacagaggaatacggtatcgtggcagataacttgcagcagcaaaacacggctcctcaaattggaactgtcaacagccagggggccttacccggtatggtttggcagaaccgggacgtgtacctgcagggtcccatctgggccaagattcctcacacggacggcaacttccacccgtctccgctgatgggcggctttggcctgaaacatcctccgcctcagatcctgatcaagaacacgcctgtacctgcggatcctccgaccaccttcaaccagtcaaagctgaactctttcatcacacagtactccacgggacaggtcagcgtggaaattgaatgggagctgcagaaggaaaacagcaagcgctggaacccggagatccagtacacttccaactactacaaatctacaaatgtggactttgctgttaacacagaaggcgtgtactctgaaccccaccccattggcacccgttacctcacccgtcccctgtaa

SEQ ID NO: 1103 - DNA, 2211 bp, Artificial Sequence
  source: /note="Description of Artificial Sequence: Synthetic polynucleotide"
atggctgccgatggttatcttccagattggctcgaggacaacctctctgagggcattcgcgagtggtgggacttgaaacctggagccccgaagcccaaagccaaccagcaaaagcaggacgacggccggggtctggtgcttcctggctacaagtacctcggacccttcaacggactcgacaagggggagcccgtcaacgcggcggacgcagcggccctcgagcacgacaaggcctacgaccagcagctcaaagcgggtgacaatccgtacctgcggtataaccacgccgacgccgagtttcaggagcgtctgcaagaagatacgtcttttgggggcaacctcgggcgagcagtcttccaggccaagaagcgggttctcgaacctctcggtctggttgaggaaggcgctaagacggctcctggaaagaaacgtccggtagagcagtcaccacaagagccagactcctcctcgggcatcggcaagacaggccagcagcccgctaaaaagagactcaattttggtcagactggcgactcagagtcagtccccgacccacaacctctcggagaacctccagcaacccccgctgctgtgggacctactacaatggcttcaggcggtggcgcaccaatggcggacaataacgaaggcgccgatggagtgggtaatgcctcaggaaattggcattgcgattccacatggctgggcgacagagtcatcaccaccagcacccgaacatgggccttgcccacctataacaaccacctctacaagcaaatctccagtgcttcaacgggggccagcaacgacaaccactacttcggctacagcaccccctgggggtattttgactttaacagattccactgccacttctcaccacgtgactggcagcgactcatcaacaacaactggggattccggcccaagagactcaacttcaagctcttcaacatccaggtcaaggaggtcacgcagaatgaaggcaccaagaccatcgccaataacctcaccagcaccatccaggtgtttacggactcggagtaccagctgccgtacgttctcggctctgcccaccagggctgcctgcctccgttcccggcggacgtgttcatgattccccagtacggctacctgactctgaacaatggcagtcaggccgtgggccgttcctccttctactgcctagagtactttccttctcaaatgctgagaacgggcaacaactttgagttcagctaccagtttgaggacgtgccttttcacagcagctacgcgcacagccaaagcctggaccggctgatgaatcctctgattgaccagtacctgtactacttgtctcggactcaaacaacaggaggcacggcaaatacgcagactctgggcttcagccaaggtgggcctaatacaatggccaatcaggcaaagaactggctgccaggaccctgttaccgccaacaacgcgtctcaacgacaaccgggcaaaacaacaatagcaactttgcctggactgctgggaccaaataccatatgaatggaagaaattcattggttaatcctggcatcgctatggcaacacacaaagacgacaaggagcgtttttttcccagtaacgggatcctgatttttggcaaacaaaatgttgccagagacaatgcggattacagcgatgtcatgctcaccagcgaggaagaaatcaaaaccactaaccctgtggctacagaggaatacggtattgtggcagataacttgcagcagcaaaacacggctcctcaaattggaactgtcaacagccagggggccttacccggtatggtctggcagaaccgggacgtgtacctgcagggtcccatctgggccaagattcctcacacggacggcaacttccacccgtcgccgctgatgggcggctttggcctgaaacatcctccgcctcagatcctgatcaagaacacgcctgtacctgcggatcctccgaccaccttcaaccagtcaaagctgaactctttcatcacgcaatacagcaccggacaggtcagcgtggaaattgaatgggagctgcagaaggaaaacagcaagcgctggaaccccgagatccagtacacctccaactactacaaatctacaagtgtggactttgctgttaatacagaaggcgtgtactctgaaccccaccccattggcacccgttacctcacccgtcccctgtaa

SEQ ID NO: 1104 - protein, 736 aa, Artificial Sequence
  source: /note="Description of Artificial Sequence: Synthetic polypeptide"
MAADGYLPDWLEDTLSEGIRQWWKLKPGPPPPKPAERHKDDSRGLVLPGYKYLGPFNGLDKGEPVNEADAAALEHDKAYDRQLDSGDNPYLKYNHADAEFQERLKEDTSFGGNLGRAVFQAKKRVLEPLGLVEEPVKTAPGKKRPVEQSPQEPDSSSGIGKKGQQPAKKRLNFGQTGDSESVPDPQPLGEPPATPAAVGPTTMASGGGAPMADNNEGADGVGNASGNWHCDSTWMGDRVITTSTRTWALPTYNNHLYKQISSASTGASNDNHYFGYSTPWGYFDFNRFHCHFSPRDWQRLINNNWGFRPKRLNFRLFNIQVKEVTDNNGVKTIANNLTSTVQVFTDSEYQLPYVLGSAHQGCLPPFPADVFMIPQYGYLTLNNGSQAVGRSSFYCLEYFPSQMLRTGNNFTFSYTFEEVPFHSSYAHSQSLDRLMNPLIDQYLYYLSRTQTTGGTANTQTLGFSQGGPNTMANQAKNWLPGPCYRQQRVSTTTGQNNNSNFAWTAGTKYHLNGRNSLANPGIAMATHKDDKERFFPSNGILIFGKQNAARDNADYSDVMLTSEEEIKTTNPVATEEYGIVADNLQQQNTAPQIGTVNSQGALPGMVWQNRDVYLQGPIWAKIPHTDGNFHPSPLMGGFGLKHPPPQILIKNTPVPADPPTTFNQSKLNSFITQYSTGQVSVEIEWELQKENSKRWNPEIQYTSNYYKSTSVDFAVNTEGVYSEPHPIGTRYLTRPL

SEQ ID NO: 1105 - protein, 736 aa, Artificial Sequence
  source: /note="Description of Artificial Sequence: Synthetic polypeptide"
MAADGYLPDWLEDNLSEGIREWWDLKPASPKPKANQQKQDDGRGLVLPGYKYLGPFNGLDKGEPVNAADAAALEHDKAYDQQLKAGDNPYLRYNHADAEFQERLQEDTSFGGNLGRAVFQAKKRLLEPLGLVEEAAKTAPGKKRPVEQSPQEPDSSAGIGKSGAQPAKKRLNFGQTGGTESVPDPQPLGEPPAAPSGVGPNTMAAGGGAPMADNNEGADGVGSSSGNWHCDSTWLGDRVITTSTRTWALPTYNNHLYKQISSASTGASNDNHYFGYSTPWGYFDFNRFHCHFSPRDWQRLINNNWGFRPKRLSFKLFNIQVKEVTQNEGTKTIANNLTSTIQVFTDSEYQLPYVLGSAHQGCLPPFPADVFMIPQYGYLTLNNGSQAVGRSSFYCLEYFPSQMLRTGNNFQFTYTFEDVPFHSSYAHSQSLDRLMNPLIDQYLYYLSRTQTTGGTANTQTLGFSQGGPNTMANQAKNWLPGPCYRQQRVSTTTGQNNNSNFAWTAGTKYHLNGRNSLANPGIAMATHKDDKERFFPSNGILIFGKQNAARDNADYSDVMLTSEEEIKTTNPVATEEYGIVADNLQQQNTAPQIGTVNSQGALPGMVWQNRDVYLQGPIWAKIPHTDGNFHPSPLMGGFGLKHPPPQILIKNTPVPADPPTTFNQSKLNSFITQYSTGQVSVEIEWELQKENSKRWNPEIQYTSNYYKSTSVDFAVNTEGVYSEPHPIGTRYLTRPL

SEQ ID NO: 1106 - protein, 736 aa, Artificial Sequence; identical to SEQ ID NO: 1045
  source: /note="Description of Artificial Sequence: Synthetic polypeptide"

SEQ ID NO: 1107 - protein, 736 aa, Artificial Sequence
  source: /note="Description of Artificial Sequence: Synthetic polypeptide"
MAADGYLPDWLEDNLSEGIREWWDLEPGAPKPKANQQKQDDGRGLVLPGYKYLGPFNGLDKGEPVNAADAAALEHDKAYDQQLKAGDNPYLRYNHADAEFQERLQEDTSFGGNLGRAVFQAKKRVLEPLGLVEEGAKTAPGKKRPVEQSPQEPDSSSGIGKTGQQPAKKRLNFGQTGDSESVPDPQPLGEPPATPAAVGPTTMASGGGAPMADNNEGADGVGNASGNWHCDSTWLGDRVITTSTRTWALPTYNNHLYKQISSASTGASNDNHYFGYSTPWGYFDFNRFHCHFSPRDWQRLINNNWGFRPKRLNFKLFNIQVKEVTDNNGVKTIANNLTSTVQVFTDSEYQLPYVLGSAHQGCLPPFPADVFMIPQYGYLTLNNGSQAVGRSSFYCLEYFPSQMLRTGNNFQFTYTFEDVPFHSSYAHSQSLDRLMNPLIDQYLYYLSRTQTTGGTANTQTLGFSQGGPNTMANQAKNWLPGPCYRQQRVSTTTGQNNNSNFAWTAGTKYHLNGRNSLANPGIAMATHKDDKERFFPSNGILIFGKQNAARDNADYSDVMLTSEEEIKTTNPVATEEYGIVADNLQQQNTAPQIGTVNSQGALPGMVWQNRDVYLQGPIWAKIPHTDGNFHPSPLMGGFGLKHPPPQILIKNTPVPADPPTTFNQSKLNSFITQYSTGQVSVEIEWELQKENSKRWNPEIQYTSNYYKSTSVDFAVNTEGVYSEPHPIGTRYLTRPL

SEQ ID NO: 1108 - protein, 736 aa, Artificial Sequence; identical to SEQ ID NO: 1045
  source: /note="Description of Artificial Sequence: Synthetic polypeptide"

SEQ ID NO: 1109 - protein, 736 aa, Artificial Sequence
  source: /note="Description of Artificial Sequence: Synthetic polypeptide"
MAADGYLPDWLEDTLSEGIRQWWKLKPGPPPPKPAERHKDDSRGLVLPGYKYLGPFNGLDKGEPVNEADAAALEHDKAYDRQLDSGDNPYLKYNHADAEFQERLKEDTSFGGNLGRAVFQAKKRVLEPLGLVEEPVKTAPGKKRPVEQSPQEPDSSSGIGKKGQQPAKKRLNFGQTGDSESVPDPQPLGEPPATPAAVGPTTMASGGGAPMADNNEGADGVGNASGNWHCDSTWLGDRVITTSTRTWALPTYNNHLYKQISSASTGASNDNHYFGYSTPWGYFDFNRFHCHFSPRDWQRLINNNWGFRPKRLNFKLFNIQVKEVTDNNGVKTIANNLTSTVQVFTDSDYQLPYVLGSAHQGCLPPFPADVFMIPQYGYLTLNNGSQAVGRSSFYCLEYFPSQMLRTGNNFQFTYTFEDVPFHSSYAHSQSLDRLMNPLIDQYLYYLSRTQTTGGTANTQTLGFSQGGPNTMANQAKNWLPGPCYRQQRVSTTTGQNNNSNFAWTAGTKYHLNGRNSLANPGIAMATHKDDKERFFPSNGILIFGKQNAARDNADYSDVMLTSEEEIKTTNPVATEEYGIVADNLQQQNTAPQIGTVNSQGALPGMVWQNRDVYLQGPIWAKIPHTDGNFHPSPLMGGFGLKHPPPQILIKNTPVPADPPTTFNQSKLNSFITQYSTGQVSVEIEWELQKENSKRWNPEIQYTSNYYKSTSVDFAVNTEGVYSEPHPIGTRYLTRPL

SEQ ID NO: 1110 - protein, 734 aa, Artificial Sequence
  source: /note="Description of Artificial Sequence: Synthetic polypeptide"
MAADGYLPDWLEDTLSEGIRQWWKLKPGPPPPKPAERHKDDSRGLVLPGYKYLGPFNGLDKGEPVNEADAAALEHDKAYDQQLQAGDNPYLRYNHADAEFQERLQGDTSFGGNLGRAVFQAKKRLLEPLGLVEEAAKTAPGKKRPVEQSPQEPDSSAGIGKSGAQPAKKRLNFGQTGDTESVPDPQPIGEPPAAPSGVGSLTMASGGGAPVADNNEGADGVGSSSGNWHCDSQWLGDRVITTSTRTWALPTYNNHLYKQISSASTGASNDNHYFGYSTPWGYFDFNRFHCHFSPRDWQRLINNNWGFRPKRLSFKLFNHPGQGGHAERHQDHRQPHQHIQVFTDSEYQLPYVLGSAHQGCLPPFPADVFMIPQYGYLTLNNGSQAVGRSSFYCLEYFPSQMLRTGNNFQFTYTFEDVPFHSSYAHSQSLDRLMNPLIDQYLYYLSRTQTTGGTANTQTLGFSQGGPNTMANQAKNWLPGPCYRQQRVSTTTGQNNNSNFAWTAGTKYHLNGRNSLGNPGIAMATHKDDKERFFPSNGILIFGKQNAARDNADYSDVMLTSEEEIKTTNPVATEEYGIVADNLQQQNTAPQIGTVNSQGALPGMVWQNRDVYLQGPIWAKIPHTDGNFHPSPLMGGFGLKHPPPQILIKNTPVPADPPTAFNQSKLNSFITQYSTGQVSVEIEWELQKENSKRWNPEIQYTSNYYKSTSVDFAVNTEGVYSEPHPIGTRYLTRPL

SEQ ID NO: 1111 - protein, 737 aa, Artificial Sequence
  source: /note="Description of Artificial Sequence: Synthetic polypeptide"
MAADGYLPDWLEDNLSEGIREWWDLKHGAPKPKANQQKQDDGRGLVLPGYKYLGPFNGLDKGEPVNAADAAALEHDKAYDQQLKAGDNPYLRYNHADAEFQERLQEDTSFGGNLGRAVFQAKKRVLEPFGLVEEGAKTAPGKKRPVEQSPQEPDSSSGIGKTGQQPAKKRLNFGQTGDSESVPDPQPLGEPPATPAAVGPTTMASGGGAPMADNNEGADGVGNASGNWHCDSTWLGDRVITTSTRTWALPTYNNHLYKQISNGTSGGSTNDNTYFGYSTPWGYFDFNRFHCHFSPRDWQRLINNNWGFRPKRLNFKLFNIQVKEVTQNEGTKTIANNLTSTIQVFTDSEYQLPYVLGSAHQGCLPPFPADVFMIPQYGYLTLNNGSQAVGRSSFYCLEYFPSQMLRTGNNFTFSYTFEDVPFHSSYAHSQSLDRLMNPLIDQYLYYLSRTQTTGGTANTQTLGFSQGGPNTMANQAKNWLPGPCYRQQRVSTTTGQNNNSNFAWTAGTKYHLNGRNSLANPGIAMATHKDDKERFFPSNGILIFGKQNAARDNADYSDVMLTSEEEIKTTNPVATEEYGIVADNLQQQNTAPQIGTVNSQGALPGMVWQNRDVYLQGPIWAKIPHTDGNFHPSPLMGGFGLKHPPPQILIKNTPVPADPPTTFNQSKLNSFITQYSTGQVSVEIEWELQKENSKRWNPEIQYTSNYYKSTSVDFAVNTEGVYSDPHPIGTRYLTRPL

SEQ ID NO: 1112 - protein, 737 aa, Artificial Sequence
  source: /note="Description of Artificial Sequence: Synthetic polypeptide"
MAADGYLPDWLEDNLSEGIREWWALKPGAPKPKANQQKQDDGRGLVLPGYKYLGPFNGLDKGEPVNEADAAALEHDKAYDQQLKAGDNPYLRYNHADAEFQERLQEDTSFGGNLGRAVFQAKKRVLEPLGLVEEGAKTAPGKKRPVEPSPQRSPDSSTGIGKKGQQPARKRLNFGQTGDSESVPDPQPLGEPPAAPSGVGPNTMASGGGAPMADNNEGADGVGNSSGNWHCDSTWMGDRVITTSTRTWALPTYNNHLYKQISSASTGASNDNHYFGYSTPWGYFDFNRFHCHFSPRDWQRLINNNWGFRPKRLNFKLFNIQVKEVTQNEGTKTIANNLTSTIQVFTDSEYQLPYVLGSAHQGCLPPFPADVFMIPQYGYLTLNNGSQAVGRSSFYCLEYFPSQMLRTGNNFQFTYTFEDVPFHSSYAHSQSLDRLMNPLIDQYLYYLSRTQTTGGTANTQTLGFSQGGPNTMANQAKNWLPGPCYRQQRVSTTTGQNNNSNFAWTAGTKYHLNGRNSLANPGIAMATHKDDKERFFPSNGILIFGKQNAARDNADYSDVMLTSEEEIKTTNPVATEEYGIVADNLQQQNTAPQIGTVNSQGALPGMVWQNRDVYLQGPIWAKIPHTDGNFHPSPLMGGFGLKHPPPQILIKNTPVPADPPTTFNQSKLNSFITQYSTGQVSVEIEWELQKENSKRWNPEIQYTSNYYKSTSVDFAVNTEGVYSEPHPIGTRYLTRPL

SEQ ID NO: 1113 - protein, 736 aa, Artificial Sequence
  source: /note="Description of Artificial Sequence: Synthetic polypeptide"
  MOD_RES (226)..(226): Any naturally occurring amino acid
MAADGYLPDWLEDTLSEGIRQWWKLKPGPPPPKPAERHKDDSRGLVLPGYKYLGPFNGLDKGEPVNEADAAALEHDKAYDRQLDSGDNPYLKYNHADAEFQERLKEDTSFGGNLGRAVFQAKKRVLEPLGLVEEPVKTAPGKKRPVEQSPQEPDSSSGIGKKGQQPAKKRLNFGQTGDSESVPDPQPLGEPPATPAAVGPTTMASGGGAPMADNNEGADGVGNASXNWHCDSTWLGDRVITTSTRTWALPPITTTSTSKSPVLQRGRSNDNHYFGYSTPWGYFDFNRFHCHFSPRDWQRLINNNWGFRPKRLNFKLFNIQVKEVTDNNGVKTIANNLTSTVQVFTDSDYQLPYVLGSAHQGCLPPFPADVFMIPQYGYLTLNNGSQAVGRSSFYCLEYFPSQMLRTGNNFQFTYTFEDVPFHSSYAHSQSLDRLMNPLIDQYLYYLSRTQTTGGTANTQTLGFSQGGPNTMANQAKNWLPGPCYRQQRVSTTTGQNNNSNFAWTAGTKYHLNGRNSLANPGIAMATHKDDKERFFPSNGILIFGKQNAARDNADYSDVMLTSEEEIKTTNPVATEEYGIVADNLQQQNTAPQIGTVNSQGALPGMVWQNRDVYLQGPIWAKIPHTDGNFHPSPLMGGFGLKHPPPQILIKNTPVPADPPTTFNQSKLNSFITQYSTGQVSVEIEWELQKENSKRWNPEIQYTSNYYKSTNVDFAVNTEGVYSEPHPIGTRYLTRPL

SEQ ID NO: 1114 - protein, 736 aa, Artificial Sequence
  source: /note="Description of Artificial Sequence: Synthetic polypeptide"
  MOD_RES (239)..(239): Any naturally occurring amino acid
MAADGYLPDWLEDNLSEGIREWWDLKPGAPKPKANQQKQDDGRGLVLPGYKYLGPFNGLDKGEPVNAADAAALEHDKAYDQQLQAGDNPYLRYNHADAEFQERLQGDTSFGGNLGRAVFQAKKRVLEPLGLVEEAAKTAPGKKRPVEQSPQEPDSSAGIGKSGAQPAKKRLNFGQTGDTESVPDPQPIGEPPAAPSGVGPNTMAAGGGAPMADNNEGADGVGSSSGNWHCDSTWLGDRXITTSTRTWALPTYNNHLYKQISSASTGASNDNHYFGYSTPWGYFDFNRFHCHFSPRDWQRLINNNWGFRPKRLNFKLFNIQVKEVTDNNGVKTIANNLTSTVQVFTDSEYQLPYVLGSAHQGCLPPFPADVFMIPQYGYLTLNNGSQAVGRSSFYCLEYFPSQMLRTGNNFTFSYTFEDVPFHSSYAHSQSLDRLMNPLIDQYLYYLSRTQTTGGTANTQTLGFSQGGPNTMANQAKNWLPGPCYRQQRVSTTTGQNNNSNFAWTAGTKYHLNGRNSLANPGIAMATHKDDKERFFPSNGILIFGKQNAARDNADYSDVMLTSEEEIKTTNPVATEEYGIVADNFQQQNTAPQIGTVNSQGALPGMVWQNRDVYLQGPIWAKIPHTDGNFHPSPLMGGFGLKHPPPQILIKNTPVPADPPTTFNQSKLNSFITQYSTGQVSVEIEWELQKENSKRWNPEIQYTSNYYKSTSVDFAVNTEGVYSEPHPIGTRYLTRPL

SEQ ID NO: 1115 - protein, 736 aa, Artificial Sequence
  source: /note="Description of Artificial Sequence: Synthetic polypeptide"
MAADGYLPDWLEDNLSEGIREWWALKPGAPKPKANQQKQDDGRGLVLPGYKYLGPFNGLDKGEPVNEADAAALEHDKAYDQQLKAGDNPYLKYNHADAEFQERLQEDTSFGGNLGRAVFQAKKRLLEPLGLVEEAAKTAPGKKRPVEQSPQEPDSSAGIGKSGAQPAKKRLNFGQTGDTESVPDPQPLGEPPATPAAVGPTTMASGGGAPMADNNEGADGVGNASGNWHCDSTWLGDRVITTSTRTWALPTYNNHLYKQISSASTGASNDNHYFGYSTPWGYFDFNRFHCHFSPRDWQRLINNNWGFRPKRLSFKLFNIQVKEVTQNEGTKTIANNLTSTIQVFTDSEYQLPYVLGSAHQGCLPPFPADVFMIPQYGYLTLNNGSQAVGRSSFYCLEYFPSQMLRTGNNFQFTYTFEDVPFHSSYAHSQSLDRLMNPLIDQYLYYLSRTQTTGGTANTQTLGFSQGGPNTMANQAKNWLPGPCYRQQRVSTTTGQNNNSNFAWTAGTKYHLNGRNSLANPGIAMATHKDDKERFFPSNGILIFGKQNAARDNADYSDVMLTSEEEIKTTNPVATEEYGIVADNLQQQNTAPQIGTVNSQGALPGMVWQNRDVYLQGPIWAKIPHTDGNFHPSPLMGGFGLKHPPPQILIKNTPVPADPPTTFNQSKLNSFITQYSTGQVSVEIEWELQKENSKRWNPEIQYTSNYYKSTSVDFAVNTEGVYSEPHPIGTRYLTRPL

SEQ ID NO: 1116 - protein, 736 aa, Artificial Sequence
  source: /note="Description of Artificial Sequence: Synthetic polypeptide"
MAADGYLPDWLEDTLSEGIRQWWKLKPGPPPPKPAERHKDDSRGLVLPGYKYLGPFNGLDKGEPVNEADAAALEHDKAYDQQLQAGDNPYLRYNHADAEFQERLQGDTSFGGNLGRAVFQAKKRLLEPLGLVEEAAKTAPGKKRPVEQSPQEPDSSAGIGKSGAQPAKKRLNFGQTGDTESVPDPQPIGEPPAAPSGVGSLTMASGGGAPVADNNEGADGVGSSSGNWHCDSQWLGDRVITTSTRTWALPTYNNHLYKQISSASTGASNDNHYFGYSTPWGYFDFNRFHCHFSPRDWQRLINNNWGFRPKRLSFKLFNIQVKEVTQNEGTKTIANNLTSTIQVFTDSEYQLPYVLGSAHQGCLPPFPADVFMIPQYGYLTLNNGSQAVGRSSFYCLEYFPSQMLRTGNNFQFTYTFEDVPFHSSYAHSQSLDRLMNPLIDQYLYYLSRTQTTGGTANTQTLGFSQGGPNTMANQAKNWLPGPCYRQQRVSTTTGQNNNSNFAWTAGTKYHLNGRNSLANPGIAMATHKDDKERFFPSNGILIFGKQNAARDNADYSDVMLTSEEEIKTTNPVATEEYGIVADNLQQQNTAPQIGTVNSQGALPGMVWQNRDVYLQGPIWAKIPHTDGNFHPSPLMGGFGLKHPPPQILIKNTPVPADPPTTFNQSKLNSFITQYSTGQVSVEIEWELQKENSKRWNPEIQYTSNYYKSTSVDFAVNTEGVYSEPHPIGTRYLTRPL

SEQ ID NO: 1117 - protein, 738 aa, Artificial Sequence
  source: /note="Description of Artificial Sequence: Synthetic polypeptide"
MAADGYLPDWLEDNLSEGIRQWWKLKPGPPPPKPAERHKDDSRGLVLPGYKYLGPFNGLDKGEPVNAADAAALEHDKAYDQQLKAGDNPYLRYNHADAEFQERLQEDTSFGGNLGRAVFQAKKRVLEPLGLVEEGAKTAPGKKRPVEPSPQRSPDSSTGIGKKGQQPAKKRLNFGQTGDSESVPDPQPLGEPPATPAAVGPTTMASGGGAPMADNNEGADGVGNASGNWHCDSTWLGDRVITTSTRTWALPTYNNHLYKQISNGTSGGSTNDNTYFGCVTPWGYFDFNKFHCHFSPDDWQRLINNGWGFRTKRLNFKLFSMKVKKGTDNTGIKTIANNLTNTVHVFADSEYQLPYVLGSAHQGCLPPFPADVFMIPQYGYLTLNNGSQAVGRSSFYCLEYFPSQMLRTGNNFTFSYTFEDVPFHSSYAHSQSLDRLMNPLIDQYLYYLSRTQTTGGTANTQTLGFSQGGPNTMANQAKNWLPGPCYRQQRVSTTTGQNNNSNFAWTAGTKYHLNGRNSLANPGIAMATHKDDKERFFPSNGILIFGKQNAARDNADYSDVMLTSEEEIKTTNPVATEEYGIVADNLQQQNTAPQIGTVNSQGALPGMVWQNRDVYLQGPIWAKIPHTDGNFHPSPLMGGFGLKHPPPQILIKNTPVPADPPTTFNQSKLNSFITQYSTGQVSVEIEWELQKENSKRWNPEIQYTSNYYKSTSVDFAVNTEGVYSEPHPIGTRYLTRPL

SEQ ID NO: 1118 - protein, 737 aa, Artificial Sequence
  source: /note="Description of Artificial Sequence: Synthetic polypeptide"
MAADGYLPDWLEDTLSEGIRQWWKLKPGPPPPKPAERHKDDSRGLVLPGYKYLGPFNGLDKGEPVNAADAAALEHDKAYDQQLKAGDNPYLRYNHADAEFQERLQEDTSFGGNLGRAVFQAKKRVLEPLGLVEEGAKTAPGKKRPVEPSPQRSPDSSTGIGKKGQQPAKKRLNFGQTGDSESVPDPQPIGEPPAGPSGLGSGTMAAGGGAPMADNNEGADGVGSSSGNWHCDSTWLGDRVITTSTRTWALPTYNNHLYKQISSASTGASNDNHYFGYSTPWGYFDFNRFHCHFSPRDWQRLINNNWGFRPKRLNFKLFNIQVKEVTDNNGVKTIANNLTSTVQVFTDSEYQLPYVLGSAHQGCLPPFPADVFMIPQYGYLTLNNGSQAVGRSSFYCLEYFPSQMLRTGNNFTFSYTFEDVPFHSSYAHSQSLDRLMNPLIDQYLYYLSRTQTTGGTANTQTLGFSQGGPNTMANQAKNWLPGPCYRQQRVSTTTGQNNNSNFAWTAGTKYHLNGRNSLANPGIAMATHKDDKERFFPSNGILIFGKQNAARDNADYSDVMLTSEEEIKTTNPVATEEYGIVADNLQQQNTAPQIGTVNSQGALPGMVWQNRDVYLQGPIWAKILHTDGNFHPSPLMGGFGMKHPPPPILIKNTPVPADPPTTFNQSKLNSFITQYSTGQVSVEIEWELPKENSKRWNPEIQYTSNYYKSTSVDFAVNTEGVYYEPHPIGTRYLTPPL

SEQ ID NO: 1119 - protein, 737 aa, Artificial Sequence
  source: /note="Description of Artificial Sequence: Synthetic polypeptide"
MAADGYLPDWLEDNLSEGIREWWALKPGAPKPKANQQKQDDGRGLVLPGYKYLGPFNGLDKGEPVNAADAAALEHDKAYDQQLKAGDNPYLRYNHADAEFQERLQEDTSFGGNLGRAVFQAKKRVLEPLGLVEEGAKTAPGKKRPVEPSPQRSPDSSTGIGKKGQQPARKRLNFGQTGDSESVPDPQPLGEPPAAPSGVAPNTMAAGGGAPMADNNEGADGVGNASGNWHCDSTWLGDRVITTSTRTWALPTYNNHLYKQISSASTGASNDNHYFGYSTPWGYFDFNRFHCHFSPRDWQRLITTIGGFRPKRLNFKLFNIQVKEVTDNNGVKTIANNLTSTVQVFTDSEYQLPYVLGSAHQGCLPPFPADVFMIPQYGYLTLNNGSQAVGRSSFYCLEYFPSQMLRTGNNFTFSYTFEDVPFHSSYAHSQSLDRLMNPLIDQYLYYLSRTQTTGGTANTQTLGFSQGGPNTMANQAKNWLPGPCYRQQRVSTTTGQNNNSNFAWTAGTKYHLNGRNSLANPGIAMATHKDDKERFFPSNGILIFGKQNAARDNADYSDVMLTSEEEIKTTNPVATEEYGIVADNLQQQNTAPQIGTVNSQGALPGMVWQNRDVYLQGPIWAKIPHTDGNFHPSPLMGGFGLKHPPPQILIKNTPVPADPPTTFNQSKLNSFITQYSTGQVSVEIEWELQKENSKRWNPEIQYTSNYYKSTSVDFAVNTEGVYSEPHPIGTRYLTRPL

SEQ ID NO: 1120 - protein, 736 aa, Artificial Sequence
  source: /note="Description of Artificial Sequence: Synthetic polypeptide"
MAADGYLPDWLEDTLSEGIRQWWKLKPGPPPPKPAERHKDDGRGLVLPGYKYLGPFNGLDKGEPVNAADAAALEHDKAYDQQLKAGDNPYLRYNHADAEFQERLQEDTSFGGNLGRAVFQAKKRVLEPLGLVEEPVKTAPGKKRPVEQSPQEPDSSSGIGKKGQQPAKKRLNFGQTGDSESVPDPQPLGEPPATPAAVGPTTMASGGGAPMADNNEGADGVGNASGNWHCDSTWMGDRVITTSTRTWALPTYNNHLYKQISSASTGASNDNHYFGYSTPWGYFDFNRFHCHFSPRDWQRLINNNWGFRPKRLNFKLFNIQVKEVTQNEGTKTIANNLTSTIQVFTDSEYQLPYVLGSAHQGCLPPFPADVFMIPQYGYLTLNNGSQAVGRSSFYCLEYFPSQMLRTGNNFQFTYTFEDVPFHSSYAHSQSLDRLMNPLIDQYLYYLSRTQTTGGTANTQTLGFSQGGPNTMANHAKNWLPGPCYRQQRVSTTTGQNNNSNFAWTAGTKYHLNGRNSLANPGIAMATHKDDKERFFPSNGILIFGKQNAARDNADYSDVMLTSEEEIKTTNPVATEEYGIVADNLQQQNTAPQIGTVNSQGALPGMVWQNRDVYLQGPIWAKIPHTDGNFHPSPLMGGFGLKHPPPQILIKNTPVPADPPTTFNQSKLNSFITQYSTGQVSVEIEWELQKENSKRWNPEIQYTSNYYKSTSVDFAVNTEGVYSEPHPIGTRYLTRPL

SEQ ID NO: 1121 - protein, 737 aa, Artificial Sequence
  source: /note="Description of Artificial Sequence: Synthetic polypeptide"
MAADGYLPDWLEDNLSQGIREWWDLKPGAPKPKANQQKQDDGRGLVLPGYKYLGPFNGLDKGEPVNAADAAALEHDKAYDQQLKAGDNPYLRYNHADAEFQERLQEDTSFGGNLGRAVFQAKKRVLEPLGLVEEGAKTAPGKKRPVEPSPQRSPDSSTGIGKKGQQPARKRLNFGQTGDSESVPDPQPLGEPPAAPAAVGPTTMASGGGAPMADNNEGADGVGSSSGNWHCDSQWLGDRVITTSTRTWALPTYNNHLYKQISSASTGASNDNHYFGYSTPWGYFDFNRFHCHFSPRDWQRLINNNWGFRPKRLSFKLFNIQVKEVTQNEGTKTIANNLTSTIQVFTDSEYQLPYVLGSAHQGCLPPFPADVFMIPQYGYLTLNNGSQAVGRSSFYCLEYFPSQMLRTGNNFQFTYTFEDVPFHSSYAHSQSLDRLMNPLIDQYLYYLSRTQTTGGTTNAQTLGFSQGGPNTMANQAKNWLPGPCYRQQRVSTTTGQNNNSNFAWTAGTKYHLNGRNSLANPGIAMATHKDDKERFFPSNGILIFGKQNAARDNADYSDVMLTSEEEIKTTNPVATEEYGIVADNLQQQNTAPQIGTVNSQGALPGMVWQNRDVYLQGPIWAKIPHTDGNFHPSPLMGGFGLKHPPPQILIKNTPVPADPPTTFNQSKLNSFITQYSTGQVSVEIEWELQKENSKRWNPEIQYTSNYYKSTNVDFAVNTEGVYSEPHPIGTRYLTRPL

SEQ ID NO: 1122 - protein, 736 aa, Artificial Sequence
  source: /note="Description of Artificial Sequence: Synthetic polypeptide"
MAADGYLPDWLEDNLSEGIREWWDLKPGAPKPKANQQKQDDGRGLVLPGYKYLGPFNGLDKGEPVNAADAAALEHDKAYDQQLKAGDNPYLRYNHADAEFQERLQEDTSFGGNLGRAVFQAKKRVLEPFGLVEEGAKTAPGKKRPVEQSPQEPDSSSGIGKTGQQPAKKRLNFGQTGDTESVPDPQPIGEPPAAPSGVGPNTMAAGGGAPMADNNEGADGVGSSSGNWHCDSTWMGDRVITTSTRTWALPTYNNHLYKQISSASTGASNDNHYFGYSTPWGYFDFNRFHCHFSPRDWQRLINNNWGFRPKRLNFKLFNIQVKEVTQNEGTKTIANNLTSTIQVFTDSEYQLPYVLGSAHQGCLPPFPADVFMIPQYGYLTLNNGSQAVGRSSFYCLEYFPSQMLRTGNNFQFTYTFEDVPFHSSYAHSQSLDRLMNPLIDQYLYYLSRTQTTGGTANTQTLGFSQGGPNTMANQAKNWLPGPCYRQQRVSTTTGQNNNSNFAWTAGTKYHLNGRNSLANPGIAMATHKDDKERFFPSNGILIFGKQNAARDNADYSDVMLTSEEEIKTTNPVATEEYGIVADNLQQQNTAPQIGTVNSQGALPGMVWQNRDVYLQGPIWAKIPHTDGNFHPSPLMGGFGLKHPPPQILIKNTPVPADPPTTFNQSKLNSFITQYSTGQVSVEIEWELQKENSKRWNPEIQYTSNYYKSTNVDFAVNTEGVYSEPHPIGTRYFTRPL

SEQ ID NO: 1123 - protein, 736 aa, Artificial Sequence
  source: /note="Description of Artificial Sequence: Synthetic polypeptide"
MAADGYLPDWLEDNLSEGIREWWDLKPGAPKPKANQQKQDDGRGLVLPGYKYLGPFNGLDKGEPVNAADAAALEHDKAYDQQLKAGDNPYLRYNHADAEFQERLQEDTSFGGNLGRAVFQAKKRVLEPLGLVEEGAKTAPGKKRPVEQSPQEPDSSSGIGKTGQQPAKKRLNFGQTGDSESVPDPQPLGEPPATPAAVGPTTMASGGGAPMADNNEGADGVGNSSGNWHCDSTWMGDRVITTSTRTWALPTYNNHLYKQISSASTGASNDNHYFGYSTPWGYFDFNRFHCHFSPRDWQRLINNNWGFRPKRLNFKLFNIQVKEVTDNNGVKTIANNLTSTVQVFTDSEYQLPYVLGSAHQGCLPPFPADVFMIPQYGYLTLNNGSQAVGRSSFYCLEYFPSQMLRTGNNFQFTYTFEDVPFHSSYAHSQSLDRLMNPLIDQYLYYLSRTQTTGGTANTQTLGFSQGGPNTMANQAKNWLPGPCYRQQRVSTTTGQNNNSNFAWTAGTKYHLNGRNSLANPGIAMATHKDDKERFFPSNGILIFGKQNAARDNADYSDVMLTSEEEIKTTNPVATEEYGIVADNLQQQNTAPQIGTVNSQGALPGMVWQNRDVYLQGPIWAKIPHTDGNFHPSPLMGGFGLKHPPPQILIKNTPVPADPPTTFNQSKLNSFITQYSTGQVSVEIEWELQKENSKRWNPEIQYTSNYYKSTNVDFAVNTEGVYSEPHPIGTRYLTRPL

SEQ ID NO: 1124 - protein, 736 aa, Artificial Sequence
  source: /note="Description of Artificial Sequence: Synthetic polypeptide"
MAADGYLPDWLEDNLSEGIREWWDLKPGAPKPKANQQKQDDGRGLVLPGYKYLGPFNGLDKGEPVNAADAAALEHDKAYDQQLKAGDNPYLRYNHADAEFQERLQEDTSFGGNLGRAVFQAKKRVLEPLGLVEEGAKTAPGKKRPVEQSPQEPDSSSGIGKTGQQPAKKRLNFGQTGDSESVPDPQPLGEPPATPAAVGPTTMASGGGAPMADNNEGADGVGNASGNWHCDSTWLGDRVITTSTRTWALPTYNNHLYKQISSASTGASNDNHYFGYSTPWGYFDFNRFHCHFSPRDWQRLINNNWGFRPKRLNFKLFNIQVKEVTQNEGTKTIANNLTSTIQVFTDSEYQLPYVLGSAHQGCLPPFPADVFMIPQYGYLTLNNGSQAVGRSSFYCLEYFPSQMLRTGNNFEFSYQFEDVPFHSSYAHSQSLDRLMNPLIDQYLYYLSRTQTTGGTANTQTLGFSQGGPNTMANQAKNWLPGPCYRQQRVSTTTGQNNNSNFAWTAGTKYHMNGRNSLVNPGIAMATHKDDKERFFPSNGILIFGKQNVARDNADYSDVMLTSEEEIKTTNPVATEEYGIVADNLQQQNTAPQIGTVNSQGALPGMVWQNRDVYLQGPIWAKIPHTDGNFHPSPLMGGFGLKHPPPQILIKNTPVPADPPTTFNQSKLNSFITQYSTGQVSVEIEWELQKENSKRWNPEIQYTSNYYKSTSVDFAVNTEGVYSEPHPIGTRYLTRPL

SEQ ID NO: 1125 - DNA, 2217 bp, Artificial Sequence
  source: /note="Description of Artificial Sequence: Synthetic polynucleotide"
atggctgccgatggttatcttccagattggctcgaggacaacctctctgagggcattcgcgagtggtgggcgctgaaacctggagccccgaagcccaaagccaaccagcaaaagcaggacgacggccggggtctggtgcttcctggctacaagtacctcggacccttcaacggactcgacaagggggagcccgtcaacgcggcggacgcagcggccctcgagcacgacaaggcctacgaccagcagctgcaggcgggtgacaatccgtacctgcggtataaccacgccgacgccgagtttcaggagcgtctgcaagaagatacgtcttttgggggcaacctcgggcgagcagtcttccaggccaagaagcgggttctcgaacctctcggtctggttgaggaaggcgctaagacggctcctggaaagaagagaccggtagagccatcaccccagcgttctccagactcctctacgggcatcggcaagaaaggccaacagcccgccagaaaaagactcaattttggtcagactggcgactcagagtcagttccagaccctcaacctctcggagaacctccagcagcgccctctggtgtgggacctaatacaatggctgcaggcggtggcgcaccaatggcagacaataacgaaggcgccgacggagtgggtagttcctcgggaaattggcattgcgattccacatggctgggcgacagagtcatcaccaccagcacccgaacctgggccctgcccacctacaacaaccacctctacaagcaaatctccaacgggacatcgggaggagccaccaacgacaacacctacttcggctacagcaccccctgggggtattttgactttaacagattccactgccacttttcaccacgtgactggcagcgactcatcaacaacaactggggattccggcccaagagactcagcttcaagctcttcaacatccaggtcaaggaggtcacgcagaatgaaggcaccaagaccatcgccaataacctcaccagcaccatccaggtgtttacggactcggagtaccagctgccgtacgttctcggctctgcccaccagggctgcctgcctccgttcccggcggacgtgttcatgattccccagtacggctacctaacactcaacaacggtagtcaggccgtgggacgctcctccttctactgcctggaatactttccttcgcagatgctgagaaccggcaacaacttccagtttacttacaccttcgaggacgtgcctttccacagcagctacgcccacagccagagcttggaccggctgatgaatcctctgattgaccagtacctgtactacttgtctcggactcaaacaacaggaggcacggcaaatacgcagactctgggcttcagccaaggtgggcctaatacaatggccaatcaggcaaagaactggctgccaggaccctgttaccgccaacaacgcgtctcaacgacaaccgggcaaaacaacaatagcaactttgcctggactgctgggaccaaataccatctgaatggaagaaattcattggctaatcctggcatcgctatggcaacacacaaagacgacgaggagcgtttttttcccagtaacgggatcctgatttttggcaaacaaaatgctgccagagacaatgcggattacagcgatgtcatgctcaccagcgaggaagaaatcaaaaccactaaccctgtggctacagaggaatacggtatcgtggcagataacttgcagcagcaaaacacggctcctcaaattggaactgtcaacagccagggggccttacccggtatggtttggcagaaccgggacgtgtacctgcagggtcccatctgggccaagattcctcacacggacggcaacttccacccgtctccgctgatgggcggctttggcctgaaacatcctccgcctcagatcctgatcaagaacacgcctgtacctgcggatcctccgaccaccttcaaccagtcaaagctgaactctttcatcacgcaatacagcaccggacaggtcagcgtggaaattgaatgggagctgcagaaggaaaacagcaagcgctggaaccccgagatccagtacacctccaactactacaaatctacaagtgtggactttgctgttaatacagaaggcgtgtactctgaaccccgccccattggcacccgttacctcacccgtaatctgtaa

SEQ ID NO: 1126 - protein, 738 aa, Artificial Sequence; identical to SEQ ID NO: 116
  source: /note="Description of Artificial Sequence: Synthetic polypeptide"

SEQ ID NO: 1127 - protein, 735 aa, Artificial Sequence
  source: /note="Description of Artificial Sequence: Synthetic polypeptide"
MAADGYLPDWLEDNLSEGVREWWALQPGAPKPKANQQHQDNARGLVLPGYKYLGPGNGLDKGEPVNAADAAALEHDKAYDQQLKAGDNPYLKYNHADAEFQQRLQGDTSFGGNLGRAVFQAKKRVLEPLGLVEQAGETAPGKKRPLIESPQQPDSSTGIGKKGKQPAKKKLVFEDETGAGDGPPEGSTSGAMSDDSEMRAAAGGAAVEGGQGADGVGNASGDWHCDSTWSEGHVTTTSTRTWVLPTYNNHLYKRLGESLQSNTYNGFSTPWGYFDFNRFHCHFSPRDWQRLINNNWGMRPKAMRVKIFNIQVKEVTTSNGETTVANNLTSTVQIFADSSYELPYVMDAGQEGSLPPFPNDVFMVPQYGYCGLVTGNTSQQQTDRNAFYCLEYFPSQMLRTGNNFEITYSFEKVPFHSMYAHSQSLDRLMNPLIDQYLWGLQSTTTGTTLNAGTATTNFTKLRPTNFSNFKKNWLPGPSIKQQGFSKTANQNYKIPATGSDSLIKYETHSTLDGRWSALTPGPPMATAGPADSKFSNSQLIFAGPKQNGNTATVPGTLIFTSEEELAATNATDTDMWGNLPGGDQSNSNLPTVDRLTALGAVPGMVWQNRDIYYQGPIWAKIPHTDGHFHPSPLIGGFGLKHPPPQIFIKNTPVPANPATTFSSTPVNSFITQYSTGQVSVQIDWEIQKERSKRWNPEVQFTSNYGQQNSLLWAPDAAGKYTEPRAIGTRYLTHHL

SEQ ID NO: 1128 - protein, 735 aa, Artificial Sequence
  source: /note="Description of Artificial Sequence: Synthetic polypeptide"
MAADGYLPDWLEDNLSEGVREWWALQPGAPKPKANQQHQDNARGLVLPGYKYLGPGNGLDKGEPVNAADAAALEHDKAYDQQLKAGDNPYLKYNHADAEFQQRLQGDTSFGGNLGRAVFQAKKRVLEPLGLVEQAGETAPGKKRPLIESPQQPDSSTGIGKKGKQPAKKKLVFEDETGAGDGPPEGSTSGAMSDDSEMRAAAGGAAVEGGQGADGVGNASGDWHCDSTWSEGHVTTTSTRTWVLPTYNNHLYKRLGESLQSNTYNGFSTPWGYFDFNRFHCHFSPRDWQRLINNNWGMRPKAMRVKIFNIQVKEVTTSNGETTVANNLTSTVQIFADSSYELPYVMDAGQEGSLPPFPNDVFMVPQYGYCGLVTGNTSQQQTDRNAFYCLEYFPSQMLRTGNNFEITYSFEKVPFHSMYAHSQSLDRLMNPLIDQYLWGLQSTTTGTTLNAGTATTNFTKLRPTNFSNFKKNWLPGPSIKQQGFSKTANQNYLIPATGSDSLIRYETHSTLDGRWSALTPGPPMATAGPADSKFSNSQLIFAGPKQNGNTATVPGTLIFTSEEELAATNATDTDMWGNLPFRDLSSSNLPTVDRSTPLGAVPGMVWQNRDIYYQGPIWAKIPHTDGHFHPSPLIGGFGLKHPPPQIFIKNTPVPANPATTFSSTPVNSFITQYSTGQVSVQIDWEIQKERSKRWNPEVQFTSNYGQQNSLLWAPDAAGKYTEPRAIGTRYLTHHL

SEQ ID NO: 1129 - protein, 735 aa, Artificial Sequence
  source: /note="Description of Artificial Sequence: Synthetic polypeptide"
MAADGYLPDWLEDNLSEGVREWWALQPGAPKPKANQQHQDNARGLVLPGYKYLGPGNGLDKGEPVNAADAAALEHDKAYDQQLKAGDNPYLKYNHADAEFQQRLQGDTSFGGNLGRAVFQAKKRVLEPLGLVEQAGETAPGKKRPLIESPQQPDSSTGIGKKGKQPAKKKLVFEDETGAGDGPPEGSTSGAMSDDSEMRAAAGGAAVEGGQGADGVGNASGDWHCDSTWSEGHVTTTSTRTWVLPTYNNHLYKRLGESLQSNTYNGFSTPWGYFDFNRFHCHFSPRDWQRLINNNWGMRPKAMRVKIFNIQVKEVTTSNGETTVANNLTSTVQIFADSSYELPYVMDAGQEGSLPPFPNDVFMVPQYGYCGLVTGNTSQQQTDRNAFYCLEYFPSQMLRTGNNFEITYSFEKVPFHSMYAHSQSLDRLMNPLIDQYLWGLQSTTTGTTLNAGTATTNFTKLRPTNFSNFKKNWLPGPSIKQQGFSKTANQNYYIPATGSDSLILYETHSTLDGRWSALTPGPPMATAGPADSKFSNSQLIFAGPKQNGNTATVPGTLIFTSEEELAATNATDTDMWGNLPGGDQSNSNLPTVDRLTALGAVPGMVWQNRDIYYQGPIWAKIPHTDGHFHPSPLIGGFGLKHPPPQIFIKNTPVPANPATTFSSTPVNSFITQYSTGQVSVQIDWEIQKERSKRWNPEVQFTSNYGQQNSLLWAPDAAGKYTEPRAIGTRYLTHHL

SEQ ID NO: 1130 - protein, 735 aa, Artificial Sequence
  source: /note="Description of Artificial Sequence: Synthetic polypeptide"
MAADGYLPDWLEDNLSEGVREWWALQPGAPKPKANQQHQDNARGLVLPGYKYLGPGNGLDKGEPVNAADAAALEHDKAYDQQLKAGDNPYLKYNHADAEFQQRLQGDTSFGGNLGRAVFQAKKRVLEPLGLVEQAGETAPGKKRPLIESPQQPDSSTGIGKKGKQPAKKKLVFEDETGAGDGPPEGSTSGAMSDDSEMRAAAGGAAVEGGQGADGVGNASGDWHCDSTWSEGHVTTTSTRTWVLPTYNNHLYKRLGESLQSNTYNGFSTPWGYFDFNRFHCHFSPRDWQRLINNNWGMRPKAMRVKIFNIQVKEVTTSNGETTVANNLTSTVQIFADSSYELPYVMDAGQEGSLPPFPNDVFMVPQYGYCGLVTGNTSQQQTDRNAFYCLEYFPSQMLRTGNNFEITYSFEKVPFHSMYAHSQSLDRLMNPLIDQYLWGLQSTTTGTTLNAGTATTNFTKLRPTNFSNFKKNWLPGPSIKQQGFSKTANQNYGIPATGSDSLIKYETHSTLDGRWSALTPGPPIATAGPADSKFSNSQLIFAGPKQNGNTATVPGTLIFTSEEELAATNATDTDMWGNLPLYDASSSNLPTVDRLTLLGAVPGMVWQNRDIYYQGPIWAKIPHTDGHFHPSPLIGGFGLKHPPPQIFIKNTPVPANPATTFSSTPVNSFITQYSTGQVSVQIDWEIQKERSKRWNPEVQFTSNYGQQNSLLWAPDAAGKYTEPRAIGTRYLTHHL

SEQ ID NO: 1131 - protein, 735 aa, Artificial Sequence
  source: /note="Description of Artificial Sequence: Synthetic polypeptide"
MAADGYLPDWLEDNLSEGVREWWALQPGAPKPKANQQHQDNARGLVLPGYKYLGPGNGLDKGEPVNAADAAALEHDKAYDQQLKAGDNPYLKYNHADAEFQQRLQGDTSFGGNLGRAVFQAKKRVLEPLGLVEQAGETAPGKKRPLIESPQQPDSSTGIGKKGKQPAKKKLVFEDETGAGDGPPEGSTSGAMSDDSEMRAAAGGAAVEGGQGADGVGNASGDWHCDSTWSEGHVTTTSTRTWVLPTYNNHLYKRLGESLQSNTYNGFSTPWGYFDFNRFHCHFSPRDWQRLINNNWGMRPKAMRVKIFNIQVKEVTTSNGETTVANNLTSTVQIFADSSYELPYVMDAGQEGSLPPFPNDVFMVPQYGYCGLVTGNTSQQQTDRNAFYCLEYFPSQMLRTGNNFEITYSFEKVPFHSMYAHSQSLDRLMNPLIDQYLWGLQSTTTGTTLNAGTATTNFTKLRPTNFSNFKKNWLPGPSIKQQGFSKTANQNYTIPATGSDSLITYETHSTLDGRWSALTPGPPGATAGPADSKFSNSQLIFAGPKQNGNTATVPGTLIFTSEEELAATNATDTDMWGNLPRVDTSASNLPTVDRYTNLGAVPGMVWQNRDIYYQGPIWAKIPHTDGHFHPSPLIGGFGLKHPPPQIFIKNTPVPANPATTFSSTPVNSFITQYSTGQVSVQIDWEIQKERSKRWNPEVQFTSNYGQQNSLLWAPDAAGKYTEPRAIGTRYLTHHL

SEQ ID NO: 1132 - protein, 735 aa, Artificial Sequence
  source: /note="Description of Artificial Sequence: Synthetic polypeptide"
MAADGYLPDWLEDNLSEGVREWWALQPGAPKPKANQQHQDNARGLVLPGYKYLGPGNGLDKGEPVNAADAAALEHDKAYDQQLKAGDNPYLKYNHADAEFQQRLQGDTSFGGNLGRAVFQAKKRVLEPLGLVEQAGETAPGKKRPLIESPQQPDSSTGIGKKGKQPAKKKLVFEDETGAGDGPPEGSTSGAMSDDSEMRAAAGGAAVEGGQGADGVGNASGDWHCDSTWSEGHVTTTSTRTWVLPTYNNHLYKRLGESLQSNTYNGFSTPWGYFDFNRFHCHFSPRDWQRLINNNWGMRPKAMRVKIFNIQVKEVTTSNGETTVANNLTSTVQIFADSSYELPYVMDAGQEGSLPPFPNDVFMVPQYGYCGLVTGNTSQQQTDRNAFYCLEYFPSQMLRTGNNFEITYSFEKVPFHSMYAHSQSLDRLMNPLIDQYLWGLQSTTTGTTLNAGTATTNFTKLRPTNFSNFKKNWLPGPSIKQQGFSKTANQNYSIPATGSDSLIKYETHSTLDGRWSALTPGPPFATAGPADSKFSNSQLIFAGPKQNGNTATVPGTLIFTSEEELAATNATDTDMWGNLPDYDSSLSNLPTVDRDTTLGAVPGMVWQNRDIYYQGPIWAKIPHTDGHFHPSPLIGGFGLKHPPPQIFIKNTPVPANPATTFSSTPVNSFITQYSTGQVSVQIDWEIQKERSKRWNPEVQFTSNYGQQNSLLWAPDAAGKYTEPRAIGTRYLTHHL

SEQ ID NO: 1133 - protein, 735 aa, Artificial Sequence
  source: /note="Description of Artificial Sequence: Synthetic polypeptide"
MAADGYLPDWLEDNLSEGVREWWALQPGAPKPKANQQHQDNARGLVLPGYKYLGPGNGLDKGEPVNAADAAALEHDKAYDQQLKAGDNPYLKYNHADAEFQQRLQGDTSFGGNLGRAVFQAKKRVLEPLGLVEQAGETAPGKKRPLIESPQQPDSSTGIGKKGKQPAKKKLVFEDETGAGDGPPEGSTSGAMSDDSEMRAAAGGAAVEGGQGADGVGNASGDWHCDSTWSEGHVTTTSTRTWVLPTYNNHLYKRLGESLQSNTYNGFSTPWGYFDFNRFHCHFSPRDWQRLINNNWGMRPKAMRVKIFNIQVKEVTTSNGETTVANNLTSTVQIFADSSYELPYVMDAGQEGSLPPFPNDVFMVPQYGYCGLVTGNTSQQQTDRNAFYCLEYFPSQMLRTGNNFEITYSFEKVPFHSMYAHSQSLDRLMNPLIDQYLWGLQSTTTGTTLNAGTATTNFTKLRPTNFSNFKKNWLPGPSIKQQGFSKTANQNYSIPATGSDSLIWYETHSTLDGRWSALTPGPPCATAGPADSKFSNSQLIFAGPKQNGNTATVPGTLIFTSEEELAATNATDTDMWGNLPQGDSSLSNLPTVDRMTVLGAVPGMVWQNRDIYYQGPIWAKIPHTDGHFHPSPLIGGFGLKHPPPQIFIKNTPVPANPATTFSSTPVNSFITQYSTGQVSVQIDWEIQKERSKRWNPEVQFTSNYGQQNSLLWAPDAAGKYTEPRAIGTRYLTHHL

SEQ ID NO: 1134 - protein, 735 aa, Artificial Sequence
  source: /note="Description of Artificial Sequence: Synthetic polypeptide"
MAADGYLPDWLEDNLSEGVREWWALQPGAPKPKANQQHQDNARGLVLPGYKYLGPGNGLDKGEPVNAADAAALEHDKAYDQQLKAGDNPYLKYNHADAEFQQRLQGDTSFGGNLGRAVFQAKKRVLEPLGLVEQAGETAPGKKRPLIESPQQPDSSTGIGKKGKQPAKKKLVFEDETGAGDGPPEGSTSGAMSDDSEMRAAAGGAAVEGGQGADGVGNASGDWHCDSTWSEGHVTTTSTRTWVLPTYNNHLYKRLGESLQSNTYNGFSTPWGYFDFNRFHCHFSPRDWQRLINNNWGMRPKAMRVKIFNIQVKEVTTSNGETTVANNLTSTVQIFADSSYELPYVMDAGQEGSLPPFPNDVFMVPQYGYCGLVTGNTSQQQTDRNAFYCLEYFPSQMLRTGNNFEITYSFEKVPFHSMYAHSQSLDRLMNPLIDQYLWGLQSTTTGTTLNAGTATTNFTKLRPTNFSNFKKNWLPGPSIKQQGFSKTANQNYCIPATGSDSLIRYETHSTLDGRWSALTPGPPLATAGPADSKFSNSQLIFAGPKQNGNTATVPGTLIFTSEEELAATNATDTDMWGNLPYKDSSRSNLPTVDRETSLGAVPGMVWQNRDIYYQGPIWAKIPHTDGHFHPSPLIGGFGLKHPPPQIFIKNTPVPANPATTFSSTPVNSFITQYSTGQVSVQIDWEIQKERSKRWNPEVQFTSNYGQQNSLLWAPDAAGKYTEPRAIGTRYLTHHL

SEQ ID NO: 1135 - protein, 735 aa, Artificial Sequence
  source: /note="Description of Artificial Sequence: Synthetic polypeptide"
MAADGYLPDWLEDNLSEGVREWWALQPGAPKPKANQQHQDNARGLVLPGYKYLGPGNGLDKGEPVNAADAAALEHDKAYDQQLKAGDNPYLKYNHADAEFQQRLQGDTSFGGNLGRAVFQAKKRVLEPLGLVEQAGETAPGKKRPLIESPQQPDSSTGIGKKGKQPAKKKLVFEDETGAGDGPPEGSTSGAMSDDSEMRAAAGGAAVEGGQGADGVGNASGDWHCDSTWSEGHVTTTSTRTWVLPTYNNHLYKRLGESLQSNTYNGFSTPWGYFDFNRFHCHFSPRDWQRLINNNWGMRPKAMRVKIFNIQVKEVTTSNGETTVANNLTSTVQIFADSSYELPYVMDAGQEGSLPPFPNDVFMVPQYGYCGLVTGNTSQQQTDRNAFYCLEYFPSQMLRTGNNFEITYSFEKVPFHSMYAHSQSLDRLMNPLIDQYLWGLQSTTTGTTLNAGTATTNFTKLRPTNFSNFKKNWLPGPSIKQQGFSKTANQNYIIPATGSDSLIYYETHSTLDGRWSALTPGPPRATAGPADSKFSNSQLIFAGPKQNGNTATVPGTLIFTSEEELAATNATDTDMWGNLPWIDNSRSNLPTVDRPTSLGAVPGMVWQNKNIYYQGPIWAKIPHTDGHFHPSPLIGGFGLKHPPPQIFIKNTPVPANPATTFTSTPVNSFITQYSTGQVSVQIDWEIQKERSKRWNPEVQFTSNYGQQNSLLWAPDAAGKYTEPRAIGTRYLTHHL

SEQ ID NO: 1136 - protein, 735 aa, Artificial Sequence
  source: /note="Description of Artificial Sequence: Synthetic polypeptide"
MAADGYLPDWLEDNLSEGVREWWALQPGAPKPKANQQHQDNARGLVLPGYKYLGPGNGLDKGEPVNAADAAALEHDKAYDQQLKAGDNPYLKYNHADAEFQQRLQGDTSFGGNLGRAVFQAKKRVLEPLGLVEQAGETAPGKKRPLIESPQQPDSSTGIGKKGKQPAKKKLVFEDETGAGDGPPEGSTSGAMSDDSEMRAAAGGAAVEGGQGADGVGNASGDWHCDSTWSEGHVTTTSTRTWVLPTYNNHLYKRLGESLQSNTYNGFSTPWGYFDFNRFHCHFSPRDWQRLINNNWGMRPKAMRVKIFNIQVKEVTTSNGETTVANNLTSTVQIFADSSYELPYVMDAGQEGSLPPFPNDVFMVPQYGYCGLVTGNTSQQQTDRNAFYCLEYFPSQMLRTGNNFEITYSFEKVPFHSMYAHSQSLDRLMNPLIDQYLWGLQSTTTGTTLNAGTATTNFTKLRPTNFSNFKKNWLPGPSIKQQGFSKTANQNYGIPATGSDSLIIYETHSTLDGRWSALTPGPPRATAGPADSKFSNSQLIFAGPKQNGNTATVPGTLIFTSEEELAATNATDTDMWGNLPGGDQSNSNLPTVDRLTALGAVPGMVWQNRDIYYQGPIWAKIPHTDGHFHPSPLIGGFGLKHPPPQIFIKNTPVPANPATTFSSTPVNSFITQYSTGQVSVQIDWEIQKERSKRWNPEVQFTSNYGQQNSLLWAPDAAGKYTEPRAIGTRYLTHHL

SEQ ID NO: 1137 - protein, 735 aa, Artificial Sequence
  source: /note="Description of Artificial Sequence: Synthetic polypeptide"
MAADGYLPDWLEDNLSEGVREWWALQPGAPKPKANQQHQDNARGLVLPGYKYLGPGNGLDKGEPVNAADAAALEHDKAYDQQLKAGDNPYLKYNHADAEFQQRLQGDTSFGGNLGRAVFQAKKRVLEPLGLVEQAGETAPGKKRPLIESPQQPDSSTGIGKKGKQPAKKKLVFEDETGAGDGPPEGSTSGAMSDDSEMRAAAGGAAVEGGQGADGVGNASGDWHCDSTWSEGHVTTTSTRTWVLPTYNNHLYKRLGESLQSNTYNGFSTPWGYFDFNRFHCHFSPRDWQRLINNNWGMRPKAMRVKIFNIQVKEVTTSNGETTVANNLTSTVQIFADSSYELPYVMDAGQEGSLPPFPNDVFMVPQYGYCGLVTGNTSQQQTDRNAFYCLEYFPSQMLRTGNNFEITYSFEKVPFHSMYAHSQSLDRLMNPLIDQYLWGLQSTTTGTTLNAGTATTNFTKLRPTNFSNFKKNWLPGPSIKQQGFSKTANQNYVIPATESDSLIYYETHSTLDGRWSALTPGPPYATAGPADSKFSNSQLIFAGPKQNGNTATVPGTLIFTSEEELAATNATDTDMWGNLPPRDDSTSNLPTVDRKTYLGAVPGMVWQNRDIYYQGPIWAKIPHTDGHFHPSPLIGGFGLKHPPPQIFIKNTPVPANPATTFSSTPVNSFITQYSTGQVSVQIDWEIQKERSKRWNPEVQFTSNYGQQNSLLWAPDAAGKYTEPRAIGTRYLTHHL

SEQ ID NO: 1138 - protein, 735 aa, Artificial Sequence
  source: /note="Description of Artificial Sequence: Synthetic polypeptide"
MAADGYLPDWLEDNLSEGVREWWALQPGAPKPKANQQHQDNARGLVLPGYKYLGPGNGLDKGEPVNAADAAALEHDKAYDQQLKAGDNPYLKYNHADAEFQQRLQGDTSFGGNLGRAVFQAKKRVLEPLGLVEQAGETAPGKKRPLIESPQQPDSSTGIGKKGKQPAKKKLVFEDETGAGDGPPEGSTSGAMSDDSEMRAAAGGAAVEGGQGADGVGNASGDWHCDSTWSEGHVTTTSTRTWVLPTYNNHLYKRLGESLQSNTYNGFSTPWGYFDFNRFHCHFSPRDWQRLINNNWGMRPKAMRVKIFNIQVKEVTTSNGETTVANNLTSTVQIFADSSYELPYVMDAGQEGSLPPFPNDVFMVPQYGYCGLVTGNTSQQQTDRNAFYCLEYFPSQMLRTGNNFEITYSFEKVPFHSMYAHSQSLDRLMNPLIDQYLWGLQSTTTGTTLNAGTATTNFTKLRPTNFSNFKKNWLPGPSIKQQGFSKTANQNYYIPATGSDSLIIYETHSTLDGRWSALTPGPPIATAGPADSKFSNSQLIFAGPKQNGNTATVPGTLIFTSEEELAATNSTDTDMWGNLPTDDDSRSNLPTVDRMTLLGAVPGMVWQNRDIYYQGPIWAKIPHTDGHFHPSPLIGGFGLKHPPPQIFIKNTPVPANPATTFSSTPVNSFITQYSTGQVSVQIDWEIQKERSKRWNPEVQFTSNYGQQNSLLWAPDAAGKYTEPRAIGTRYLTHHL

SEQ ID NO: 1139 - protein, 735 aa, Artificial Sequence
  source: /note="Description of Artificial Sequence: Synthetic polypeptide"
MAADGYLPDWLEDNLSEGVREWWALQPGAPKPKANQQHQDNARGLVLPGYKYLGPGNGLDKGEPVNAADAAALEHDKAYDQQLKAGDNPYLKYNHADAEFQQRLQGDTSFGGNLGRAVFQAKKRVLEPLGLVEQAGETAPGKKRPLIESPQQPDSSTGIGKKGKQPAKKKLVFEDETGAGDGPPEGSTSGAMSDDSEMRAAAGGAAVEGGQGADGVGNASGDWHCDSTWSEGHVTTTSTRTWVLPTYNNHLYKRLGESLQSNTYNGFSTPWGYFDFNRFHCHFSPRDWQRLINNNWGMRPKAMRVKIFNIQVKEVTTSNGETTVANNLTSTVQIFADSSYELPYVMDAGQEGSLPPFPNDVFMVPQYGYCGLVTGNTSQQQTDRNAFYCLEYFPSQMLRTGNNFEITYSFEKVPFHSMYAHSQSLDRLMNPLIDQYLWGLQSTTTGTTLNAGTATTNFTKLRPTNFSNFKKNWLPGPSIKQQGFSKTANQNYHIPATGSDSLIYYETHSTLDGRWSALTPGPPSATAGPADSKFSNSQLIFAGPKQNGNTATVPGTLIFTSEEELAATNATDTDMWGNLPRRDSSVSNLPTVDRYTDLGAVPGMVWQNRDIYYQGPIWAKIPHTDGHFHPSPLIGGFGLKHPPPQIFIKNTPVPANPATTFSSTPVNSFITQYSTGQVSVQIDWEIQKERSKRWNPEVQFTSNYGQQNSLLWAPDAAGKYTEPRAIGTRYLTHHL

SEQ ID NO: 1140 - protein, 735 aa, Artificial Sequence
  source: /note="Description of Artificial Sequence: Synthetic polypeptide"
MAADGYLPDWLEDNLSEGVREWWALQPGAPKPKANQQHQDNARGLVLPGYKYLGPGNGLDKGEPVNAADAAALEHDKAYDQQLKAGDNPYLKYNHADAEFQQRLQGDTSFGGNLGRAVFQAKKRVLEPLGLVEQAGETAPGKKRPLIESPQQPDSSTGIGKKGKQPAKKKLVFEDETGAGDGPPEGSTSGAMSDDSEMRAAAGGAAVEGGQGADGVGNASGDWHCDSTWSEGHVTTTSTRTWVLPTYNNHLYKRLGESLQSNTYNGFSTPWGYFDFNRFHCHFSPRDWQRLINNNWGMRPKAMRVKIFNIQVKEVTTSNGETTVANNLTSTVQIFADSSYELPYVMDAGQEGSLPPFPNDVFMVPQYGYCGLVTGNTSQQQTDRNAFYCLEYFPSQMLRTGNNFEITYSFEKVPFHSMYAHSQSLDRLMNPLIDQYLWGLQSTTTGTTLNAGTATTNFTKLRPTNFSNFKKNWLPGPSIKQQGFSKTANQNYSIPATGSDSLISYETHSTLDGRWSALTPGPPRATAGPADSKFSNSQLIFAGPKQNGNTATVPGTLIFTSEEELAATNATDTDMWGNLPRHDSSLSNLPTVDRNTGLGAVPGMVWQNRDIYYQGPIWAKIPHTDGHFHPSPLIGGFGLKHPPPQIFIKNTPVPANPATTFSSTPVNSFITQYSTGQVSVQIDWEIQKERSKRWNPEVQFTSNYGQQNSLLWAPDAAGKYTEPRAIGTRYLTHHL

SEQ ID NO: 1141 - protein, 735 aa, Artificial Sequence
  source: /note="Description of Artificial Sequence: Synthetic polypeptide"
MAADGYLPDWLEDNLSEGVREWWALQPGAPKPKANQQHQDNARGLVLPGYKYLGPGNGLDKGEPVNAADAAALEHDKAYDQQLKAGDNPYLKYNHADAEFQQRLQGDTSFGGNLGRAVFQAKKRVLEPLGLVEQAGETAPGKKRPLIESPQQPDSSTGIGKKGKQPAKKKLVFEDETGAGDGPPEGSTSGAMSDDSEMRAAAGGAAVEGGQGADGVGNASGDWHCDSTWSEGHVTTTSTRTWVLPTYNNHLYKRLGESLQSNTYNGFSTPWGYFDFNRFHCHFSPRDWQRLINNNWGMRPKAMRVKIFNIQVKEVTTSNGETTVANNLTSTVQIFADSSYELPYVMDAGQEGSLPPFPNDVFMVPQYGYCGLVTGNTSQQQTDRNAFYCLEYFPSQMLRTGNNFEITYSFEKVPFHSMYAHSQSLDRLMNPLIDQYLWGLQSTTTGTTLNAGTATTNFTKLRPTNFSNFKKNWLPGPSIKQQGFSKTANQNYFIPATGSDSLIRYETHSTLDGRWSALTPGPPLATAGPADSKFSNSQLIFAGPKQNGNTATVPGTLIFTSEEELAATNATDTDMWGNLPVIDFSKSNLPTVDRLTHLGAVPGMVWQNRDIYYQGPIWAKIPHTDGHFHPSPLIGGFGLKHPPPQIFIKNTPVPANPATTFSSTPVNSFITQYSTGQVSVQIDWEIQKERSKRWNPEVQFTSNYGQQNSLLWAPDAAGKYTEPRAIGTRYLTHHL

SEQ ID NO: 1142 - protein, 735 aa, Artificial Sequence
  source: /note="Description of Artificial Sequence: Synthetic polypeptide"
MAADGYLPDWLEDNLSEGVREWWALQPGAPKPKANQQHQDNARGLVLPGYKYLGPGNGLDKGEPVNAADAAALEHDKAYDQQLKAGDNPYLKYNHADAEFQQRLQGDTSFGGNLGRAVFQAKKRVLEPLGLVEQAGETAPGKKRPLIESPQQPDSSTGIGKKGKQPAKKKLVFEDETGAGDGPPEGSTSGAMSDDSEMRAAAGGAAVEGGQGADGVGNASGDWHCDSTWSEGHVTTTSTRTWVLPTYNNHLYKRLGESLQSNTYNGFSTPWGYFDFNRFHCHFSPRDWQRLINNNWGMRPKAMRVKIFNIQVKEVTTSNGETTVANNLTSTVQIFADSSYELPYVMDAGQEGSLPPFPNDVFMVPQYGYCGLVTGNTSQQQTDRNAFYCLEYFPSQMLRTGNNFEITYSFEKVPFHSMYAHSQSLDRLMNPLIDQYLWGLQSTTTGTTLNAGTATTNFTKLRPTNFSNFKKNWLPGPSIKQQGFSKTANQNYKIPATGSDSLIKYETHSTLDGRWSALTPGPPMATAGPADSKFSNSQLIFAGPKQNGNTATVPGTLIFTSEEELAATNATDTDMWGNLPVRDFSLSNLPTVDRTTKLGAVPGMVWQNRDIYYQGPIWAKIPHTDGHFHPSPLIGGFGLKHPPPQIFIKNTPVPANPATTFSSTPVNSFITQYSTGQVSVQIDWEIQKERSKRWNPEVQFTSNYGQQNSLLWAPDAAGKYTEPRAIGTRYLTHHL

SEQ ID NO: 1143 - protein, 735 aa, Artificial Sequence
  source: /note="Description of Artificial Sequence: Synthetic polypeptide"
MAADGYLPDWLEDNLSEGVREWWALQPGAPKPKANQQHQDNARGLVLPGYKYLGPGNGLDKGEPVNAADAAALEHDKAYDQQLKAGDNPYLKYNHADAEFQQRLQGDTSFGGNLGRAVFQAKKRVLEPLGLVEQAGETAPGKKRPLIESPQQPDSSTGIGKKGKQPAKKKLVFEDETGAGDGPPEGSTSGAMSDDSEMRAAAGGAAVEGGQGADGVGNASGDWHCDSTWSEGHVTTTSTRTWVLPTYNNHLYKRLGESLQSNTYNGFSTPWGYFDFNRFHCHFSPRDWQRLINNNWGMRPKAMRVKIFNIQVKEVTTSNGETTVANNLTSTVQIFADSSYELPYVMDAGQEGSLPPFPNDVFMVPQYGYCGLVTGNTSQQQTDRNAFYCLEYFPSQMLRTGNNFEITYSFEKVPFHSMYAHSQSLDRLMNPLIDQYLWGLQSTTTGTTLNAGTATTNFTKLRPTNFSNFKKNWLPGPSIKQQGFSKTANQNYFIPATGSDSLIQYETHSTLDGRWSALTPGPPMATAGPADSKFSNSQLIFAGPKQNGNTATVPGTLIFTSEEELAATNATDTDMWGNLPGGDQSNSNLPTVDRLTALGAVPGMVWQNRDIYYQGPIWAKIPHTDGHFHPSPLIGGFGLKHPPPQIFIKNTPVPANPATTFSSTPVNSFITQYSTGQVSVQIDWEIQKERSKRWNPEVQFTSNYGQQNSLLWAPDAAGKYTEPRAIGTRYLTHHL

SEQ ID NO: 1144 - protein, 735 aa, Artificial Sequence
  source: /note="Description of Artificial Sequence: Synthetic polypeptide"
MAADGYLPDWLEDNLSEGVREWWALQPGAPKPKANQQHQDNARGLVLPGYKYLGPGNGLDKGEPVNAADAAALEHDKAYDQQLKAGDNPYLKYNHADAEFQQRLQGDTSFGGNLGRAVFQAKKRVLEPLGLVEQAGETAPGKKRPLIESPQQPDSSTGIGKKGKQPAKKKLVFEDETGAGDGPPEGSTSGAMSDDSEMRAAAGGAAVEGGQGADGVGNASGDWHCDSTWSEGHVTTTSTRTWVLPTYNNHLYKRLGESLQSNTYNGFSTPWGYFDFNRFHCHFSPRDWQRLINNNWGMRPKAMRVKIFNIQVKEVTTSNGETTVANNLTSTVQIFADSSYELPYVMDAGQEGSLPPFPNDVFMVPQYGYCGLVTGNTSQQQTDRNAFYCLEYFPSQMLRTGNNFEITYSFEKVPFHSMYAHSQSLDRLMNPLIDQYLWGLQSTTTGTTLNAGTATTNFTKLRPTNFSNFKKNWLPGPSIKQQGFSKTANQNYEMPATGSDSLIIYETHSTLDGRWSALTPGPPFATAGPADSKFSNSQLIFAGPKQNGNTATVPGTLIFTSEEELAATNATDTDVWGNLPSGDHSQSNLPTVDRPTMLGAVPGMVWQNRDIYYQGPIWAKIPHTDGHFHPSPLIGGFGLKHPPPQIFIKNTPVPANPATTFISTPVNSFITQYSTGQVSVHIDWEIQKERSKRWNPEVQFTSDYGQHSSLLWAPDAAGKYTEPTAIGTRYLTHHL

SEQ ID NO: 1145 - protein, 734 aa, Artificial Sequence
  source: /note="Description of Artificial Sequence: Synthetic polypeptide"
MAADGYLPDWLEDNLSEGVREWWALQPGAPKPKANQQHQDNARGLVLPGYKYLGPGNGLDKGEPVNAADAAALEHDKAYDQQLKAGDNPYLKYNHADAEFQQRLQGDTSFGGNLGRAVFQAKKRVLEPLGLVEQAGETAPGKKRPLIESPQQPDSSTGIGKKGKQPAKKKLVFEDETGAGDGPPEGSTSGAMSDDSEMRAAAGGAAVEGGQGADGVGNASGDWHCDSTWSEGHVTTTSTRTWVLPTYNNHLYKRLGESLQSNTYNGFSTPWGYFDFNRFHCHFSPRDWQRLINNNWGMRPKAMRVKIFNIQVKEVTTSNGETTVANNLTSTVQIFADSSYELPYVMDAGQEGSLPPFPNDVFMVPQYGYCGLVTGNTSQQQTDRNAFYCLEYFPSQMLRTGNNFEITYSFEKVPFHSMYAHSQSLDRLMNPLIDQYLWGLQSTTTGTTLNAGTATTNFTKLRPTNFSNFKKNWLPGPSIKQQGFSKTANQNDIPATGSDSLIKYETHSTLDGRWSALTPGPPMATAGPADSKFSNSQLIFAGPKQNGNTATVPGTLIFTSEEELAATNATDTDMWGNLPGGDQSNSNLPTVDRLTALGAVPGMVWQNRDIYYQGPIWAKIPHTDGHFHPSPLIGGFGLKHPPPQIFIKNTPVPANPATTFSSTPVNSFITQYSTGQVSVQIDWEIQKERSKRWNPEVQFTSNYGQQNSLLWAPDAAGKYTEPRAIGTRYLTHHL

SEQ ID NO: 1146 - protein, 735 aa, Artificial Sequence
  source: /note="Description of Artificial Sequence: Synthetic polypeptide"
MAADGYLPDWLEDNLSEGVREWWALQPGAPKPKANQQHQDNARGLVLPGYKYLGPGNGLDKGEPVNAADAAALEHDKAYDQQLKAGDNPYLKYNHADAEFQQRLQGDTSFGGNLGRAVFQAKKRVLEPLGLVEQAGETAPGKKRPLIESPQQPDSSTGIGKKGKQPAKKKLVFEDETGAGDGPPEGSTSGAMSDDSEMRAAAGGAAVEGGQGADGVGNASGDWHCDSTWSEGHVTTTSTRTWVLPTYNNHLYKRLGESLQSNTYNGFSTPWGYFDFNRFHCHFSPRDWQRLINNNWGMRPKAMRVKIFNIQVKEVTTSNGETTVANNLTSTVQIFADSSYELPYVMDAGQEGSLPPFPNDVFMVPQYGYCGLVTGNTSQQQTDRNAFYCLEYFPSQMLRTGNNFEITYSFEKVPFHSMYAHSQSLDRLMNPLIDQYLWGLQSTTTGTTLNAGTATTNFTKLRPTNFSNFKKNWLPGPSIKQQGFSKTANQNYIIPATGSDSLITYETHSTLDGRWSALTPGPPVATAGPADSKFSNSQLIFAGPKQNGNTATVPGTLIFTSEEELAATNATDTDMWGNLPFNDDSSSNLPTVDRSTFLGAVPGMVWQNRDIYYQGPIWAKIPHTDGHFHPSPLIGGFGLKHPPPQIFIKNTPVPANPATTFSSTPVNSFITQYSTGQVSVQIDWEIQKERSKRWNPEVQFTSNYGQQNSLLWAPDAAGKYTEPRAIGTRYLTHHL

SEQ ID NO: 1147 - protein, 733 aa, Artificial Sequence
  source: /note="Description of Artificial Sequence: Synthetic polypeptide"
MAADGYLPDWLEDNLSEGIREWWDLKPGAPKPKANQQKQDDGRGLVLPGYKYLGPFNGLDKGEPVNAADAAALEHDKAYDQQLKAGDNPYLRYNHADAEFQERLQEDTSFGGNLGRAVFQAKKRVLEPLGLVEEGAKTAPGKKRPLESPQEPDSSSGIGKKGKQPARKRLNFEEDTGAGDGPPEGSDTSAMSSDIEMRAAPGGNAVDAGQGSDGVGNASGDWHCDSTWSEGKVTTTSTRTWVLPTYNNHLYLRLGTTSSSNTYNGFSTPWGYFDFNRFHCHFSPRDWQRLINNNWGLRPKAMRVKIFNIQVKEVTTSNGETTVANNLTSTVQIFADSSYELPYVMDAGQEGSLPPFPNDVFMVPQYGYCGIVTGENQNQTDRNAFYCLEYFPSQMLRTGNNFEMAYNFEKVPFHSMYAHSQSLDRLMNPLLDQYLWHLQSTTSGETLNQGNAATTFGKIRSGDFAFYRKNWLPGPCVKQQRFSKTASQNYKIPASGGNALLKYDTHYTLNNRWSNIAPGPPMATAGPSDGDFSNAQLIFPGPSVTGNTTTSANNLLFTSEEEIAATNPRDTDMFGQIADNNQNATTAPITGNVTAMGVLPGMVWQNRDIYYQGPIWAKIPHADGHFHPSPLIGGFGLKHPPPQIFIKNTPVPANPATTFTAARVDSFITQYSTGQVAVQIEWEIEKERSKRWNPEVQFTSNYGNQSSMLWAPDTTGKYTEPRVIGSRYLTNHL

SEQ ID NO: 1148 - protein, 742 aa, Artificial Sequence; identical to SEQ ID NO: 959
  source: /note="Description of Artificial Sequence: Synthetic polypeptide"

SEQ ID NO: 1149 - protein, 733 aa, Artificial Sequence; identical to SEQ ID NO: 432
  source: /note="Description of Artificial Sequence: Synthetic polypeptide"

SEQ ID NO: 1150 - protein, 733 aa, Artificial Sequence; identical to SEQ ID NO: 149
  source: /note="Description of Artificial Sequence: Synthetic polypeptide"

SEQ ID NO: 1151 - protein, 733 aa, Artificial Sequence; identical to SEQ ID NO: 436
  source: /note="Description of Artificial Sequence: Synthetic polypeptide"

SEQ ID NO: 1152 - protein, 735 aa, Artificial Sequence
  source: /note="Description of Artificial Sequence: Synthetic polypeptide"
MAADGYLPDWLEDNLSEGVREWWALQPGAPKPKANQQHQDNARGLVLPGYKYLGPGNGLDKGEPVNAADAAALEHDKAYDQQLKAGDNPYLKYNHADAEFQQRLQGDTSFGGNLGRAVFQAKKRVLEPLGLVEQAGETAPGKKRPLIESPQQPDSSTGIGKKGKQPAKKKLVFEDETGAGDGPPEGSTSGAMSDDSEMRAAAGGAAVEGGQGADGVGNASGDWHCDSTWSEGHVTTTSTRTWVLPTYNNHLYKRLGESLQSNTYNGFSTPWGYFDFNRFHCHFSPRDWQRLINNNWGMRPKAMRVKIFNIQVKEVTTSNGETTVANNLTSTVQIFADSSYELPYVMDAGQEGSLPPFPNDVFMVPQYGYCGLVTGNTSQQQTDRNAFYCLEYFPSQMLRTGNNFEITYSFEKVPFHSMYAHSQSLDRLMNPLIDQYLWGLQSTTTGTTLNAGTATTNFTKLRPTNFSNFKKNWLPGPSIKQQGFSKTANQNYEIPATGSDSLIEYETHSTLDGRWSALTPGPPMATAGPADSKFSNSQLIFAGPKQNGNTATVPGTLIFTSEEELAATNATDTDMWGNLPGGDQSSSNLPTVDRLTALGAVPGMVWQNRDIYYQGPIWAKIPHTDGHFHPSPLIGGFGLKHPPPQIFIKNTPVPANPATTFSSTPVNSFITQYSTGQVSVQIDWEIQKERSKRWNPEVQFTSNYGQQNSLLWAPDAAGKYTEPRAIGTRYLTHHL

SEQ ID NO: 1153 - protein, 735 aa, Artificial Sequence
  source: /note="Description of Artificial Sequence: Synthetic polypeptide"
MAADGYLPDWLEDNLSEGVREWWALQPGAPKPKANQQHQDNARGLVLPGYKYLGPGNGLDKGEPVNAADAAALEHDKAYDQQLKAGDNPYLKYNHADAEFQQRLQGDTSFGGNLGRAVFQAKKRVLEPLGLVEQAGETAPGKKRPLIESPQQPDSSTGIGKKGKQPAKKKLVFEDETGAGDGPPEGSTSGAMSDDSEMRAAAGGAAVEGGQGADGVGNASGDWHCDSTWSEGHVTTTSTRTWVLPTYNNHLYKRLGESLQSNTYNGFSTPWGYFDFNRFHCHFSPRDWQRLINNNWGMRPKAMRVKIFNIQVKEVTTSNGETTVANNLTSTVQIFADSSYELPYVMDAGQEGSLPPFPNDVFMVPQYGYCGLVTGNTSQQQTDRNAFYCLEYFPSQMLRTGNNFEITYSFEKVPFHSMYAHSQSLDRLMNPLIDQYLWGLQSTTTGTTLNAGTATTNFTKLRPTNFSNFKKNWLPGPSIKQQGFSKTANQNYEIPATGSDSLIEYETHSTLDGRWSALTPGPPMATAGPADSKFSNSQLIFAGPKQNGNTATVPGTLIFTSEEELAATNATDTDMWGNLPGGDQSSSNLPVVRGLRALGAVPGMVWQNRDIYYQGPIWAKIPHTDGHFHPSPLIGGFGLKHPPPQIFIKNTPVPANPATTFSSTPVNSFITQYSTGQVSVQIDWEIQKERSKRWNPEVQFTSNYGQQNSLLWAPDAAGKYTEPRAIGTRYLTHHL

SEQ ID NO: 1154 - protein, 735 aa, Artificial Sequence
  source: /note="Description of Artificial Sequence: Synthetic polypeptide"
MAADGYLPDWLEDNLSEGVREWWALQPGAPKPKANQQHQDNARGLVLPGYKYLGPGNGLDKGEPVNAADAAALEHDKAYDQQLKAGDNPYLKYNHADAEFQQRLQGDTSFGGNLGRAVFQAKKRVLEPLGLVEQAGETAPGKKRPLIESPQQPDSSTGIGKKGKQPAKKKLVFEDETGAGDGPPEGSTSGAMSDDSEMRAAAGGAAVEGGQGADGVGNASGDWHCDSTWSEGHVTTTSTRTWVLPTYNNHLYKRLGESLQSNTYNGFSTPWGYFDFNRFHCHFSPRDWQRLINNNWGMRPKAMRVKIFNIQVKEVTTSNGETTVANNLTSTVQIFADSSYELPYVMDAGQEGSLPPFPNDVFMVPQYGYCGLVTGNTSQQQTDRNAFYCLEYFPSQMLRTGNNFEITYSFEKVPFHSMYAHSQSLDRLMNPLIDQYLWGLQSTTTGTTLNAGTATTNFTKLRPTNFSNFKKNWLPGPSIKQQGFSKTANQNYEIPATGSDSLIEYETHSTLDGRWSALTPGPPMATAGPADSKFSNSQLIFAGPKQNGNTATVPGTLIFTSEEELAATNATDTDMWGNLPGGDQSSSNLPVVNRLSALGAVPGMVWQNRDIYYQGPIWAKIPHTDGHFHPSPLIGGFGLKHPPPQIFIKNTPVPANPATTFSSTPVNSFITQYSTGQVSVQIDWEIQKERSKRWNPEVQFTSNYGQQNSLLWAPDAAGKYTEPRAIGTRYLTHHL

SEQ ID NO: 1155 - protein, 735 aa, Artificial Sequence
  source: /note="Description of Artificial Sequence: Synthetic polypeptide"
MAADGYLPDWLEDNLSEGVREWWALQPGAPKPKANQQHQDNARGLVLPGYKYLGPGNGLDKGEPVNAADAAALEHDKAYDQQLKAGDNPYLKYNHADAEFQQRLQGDTSFGGNLGRAVFQAKKRVLEPLGLVEQAGETAPGKKRPLIESPQQPDSSTGIGKKGKQPAKKKLVFEDETGAGDGPPEGSTSGAMSDDSEMRAAAGGAAVEGGQGADGVGNASGDWHCDSTWSEGHVTTTSTRTWVLPTYNNHLYKRLGESLQSNTYNGFSTPWGYFDFNRFHCHFSPRDWQRLINNNWGMRPKAMRVKIFNIQVKEVTTSNGETTVANNLTSTVQIFADSSYELPYVMDAGQEGSLPPFPNDVFMVPQYGYCGLVTGNTSQQQTDRNAFYCLEYFPSQMLRTGNNFEITYSFEKVPFHSMYAHSQSLDRLMNPLIDQYLWGLQSTTTGTTLNAGTATTNFTKLRPTNFSNFKKNWLPGPSIKQQGFSKTANQNYEIPATGSDSLIEYETHSTLDGRWSALTPGPPMATAGPADSKFSNSQLIFAGPKQNGNTATVPGTLIFTSEEELAATNATDTDMWGNLPGGDQSSSNLPPVMGLGALGAVPGMVWQNRDIYYQGPIWAKIPHTDGHFHPSPLIGGFGLKHPPPQIFIKNTPVPANPATTFSSTPVNSFITQYSTGQVSVQIDWEIQKERSKRWNPEVQFTSNYGQQNSLLWAPDAAGKYTEPRAIGTRYLTHHL

SEQ ID NO: 1156 - protein, 736 aa, Artificial Sequence
  source: /note="Description of Artificial Sequence: Synthetic polypeptide"
MAADGYLPDWLEDNLSEGVREWWALQPGAPKPKANQQHQDNARGLVLPGYKYLGPGNGLDKGEPVNAADAAALEHDKAYDQQLKAGDNPYLKYNHADAEFQQRLQGDTSFGGNLGRAVFQAKKRVLEPLGLVEQAGETAPGKKRPLIESPQQPDSSTGIGKKGKQPAKKKLVFEDETGAGDGPPEGSTSGAMSDDSEMRAAAGGAAVEGGQGADGVGNASGDWHCDSTWSEGHVTTTSTRTWVLPTYNNHLYKRLGESLQSNTYNGFSTPWGYFDFNRFHCHFSPRDWQRLINNNWGMRPKAMRVKIFNIQVKEVTTSNGETTVANNLTSTVQIFADSSYELPYVMDAGQEGSLPPFPNDVFMVPQYGYCGLVTGNTSQQQTDRNAFYCLEYFPSQMLRTGNNFEITYSFEKVPFHSMYAHSQSLDRLMNPLIDQYLWGLQSTTTGTTLNAGTATTNFTKLRPTNFSNFKKNWLPGPSIKQQGFSKTANQNYEIPATGSDSLIEYETHSTLDGRWSALTPGPPMATAGPADSKFSNSQLIFAGPKQNGNTATVPGTLIFTSEEELAATNATDTDMWGNLPGGDQSRVDRLPTVDRLTALGAVPGMVWQNRDIYYQGPIWAKIPHTDGHFHPSPLIGGFGLKHPPPQIFIKNTPVPANPATTFSSTPVNSFITQYSTGQVSVQIDWEIQKERSKRWNPEVQFTSNYGQQNSLLWAPDAAGKYTEPRAIGTRYLTHHL

SEQ ID NO: 1157 - protein, 736 aa, Artificial Sequence
  source: /note="Description of Artificial Sequence: Synthetic polypeptide"
MAADGYLPDWLEDNLSEGVREWWALQPGAPKPKANQQHQDNARGLVLPGYKYLGPGNGLDKGEPVNAADAAALEHDKAYDQQLKAGDNPYLKYNHADAEFQQRLQGDTSFGGNLGRAVFQAKKRVLEPLGLVEQAGETAPGKKRPLIESPQQPDSSTGIGKKGKQPAKKKLVFEDETGAGDGPPEGSTSGAMSDDSEMRAAAGGAAVEGGQGADGVGNASGDWHCDSTWSEGHVTTTSTRTWVLPTYNNHLYKRLGESLQSNTYNGFSTPWGYFDFNRFHCHFSPRDWQRLINNNWGMRPKAMRVKIFNIQVKEVTTSNGETTVANNLTSTVQIFADSSYELPYVMDAGQEGSLPPFPNDVFMVPQYGYCGLVTGNTSQQQTDRNAFYCLEYFPSQMLRTGNNFEITYSFEKVPFHSMYAHSQSLDRLMNPLIDQYLWGLQSTTTGTTLNAGTATTNFTKLRPTNFSNFKKNWLPGPSIKQQGFSKTANQNYEIPATGSDSLIEYETHSTLDGRWSALTPGPPMATAGPADSKFSNSQLIFAGPKQNGNTATVPGTLIFTSEEELAATNATDTDMWGNLPGGDQSRALRLPTVDRLTALGAVPGMVWQNRDIYYQGPIWAKIPHTDGHFHPSPLIGGFGLKHPPPQIFIKNTPVPANPATTFSSTPVNSFITQYSTGQVSVQIDWEIQKERSKRWNPEVQFTSNYGQQNSLLWAPDAAGKYTEPRAIGTRYLTHHL

SEQ ID NO: 1158 - DNA, 1172 bp, Artificial Sequence
  source: /note="Description of Artificial Sequence: Synthetic polynucleotide"
cttaattaggctgcgcgctcgctcgctcactgaggccgcccgggcaaagcccgggcgtcgggcgacctttggtcgcccggcctcagtgagcgagcgagcgcgcagagagggagtggccaactccatcactaggggttccttgtagttaatgattaacccgccatgctacttatctaccagggtaatggggatcctctagaactatagctagtcgacattgattattgactagttattaatagtaatcaattacggggtcattagttcatagcccatatatggagttccgcgttacataacttacggtaaatggcccgcctggctgaccgcccaacgacccccgcccattgacgtcaataatgacgtatgttcccatagtaacgccaatagggactttccattgacgtcaatgggtggactatttacggtaaactgcccacttggcagtacatcaagtgtatcatatgccaagtacgccccctattgacgtcaatgacggtaaatggcccgcctggcattatgcccagtacatgaccttatgggactttcctacttggcagtacatctacgtattagtcatcgctattaccatgtcgaggccacgttctgcttcactctccccatctcccccccctccccacccccaattttgtatttatttattttttaattattttgtgcagcgatgggggcggggggggggggcgcgcgccaggcggggcggggcggggcgaggggcggggcggggcgaggcggagaggtgcggcggcagccaatcagagcggcgcgctccgaaagtttccttttatggcgaggcggcggcggcggcggccctataaaaagcgaagcgcgcggcgggcgggagcaagctttattgcggtagtttatcacagttaaattgctaacgcagtcagtgcttctgacacaacagtctcgaacttaagctgcagaagttggtcgtgaggcactgggcaggtaagtatcaaggttacaagacaggtttaaggagaccaatagaaactgggcttgtcgagacagagaagactcttgcgtttctgataggcacctattggtcttactgacatccactttgcctttctctccacaggtgtccactcccagttcaattacagctcttaaggctagagtacttaatacgactcsactatagg

SEQ ID NO: 1159 - DNA, 3231 bp, Artificial Sequence
  source: /note="Description of Artificial Sequence: Synthetic polynucleotide"
taagaattcacgcgtggtacctctagagtcgacccgggcggcctcgaggacggggtgaactacgcctgaggatccgatctttttccctctgccaaaaattatggggacatcatgaagccccttgagcatctgacttctggctaataaaggaaatttattttcattgcaatagtgtgttggaattttttgtgtctctcactcggaagcaattcgttgatctgaatttcgaccacccataatacccattaccctggtagataagtagcatggcgggttaatcattaactacaaggaacccctagtgatggagttggccactccctctctgcgcgctcgctcgctcactgaggccgggcgaccaaaggtcgcccgacgcccgggctttgcccgggcggcctcagtgagcgagcgagcgcgcagccttaattaacctaattcactggccgtcgttttacaacgtcgtgactgggaaaaccctggcgttacccaacttaatcgccttgcagcacatccccctttcgccagctggcgtaatagcgaagaggcccgcaccgatcgcccttcccaacagttgcgcagcctgaatggcgaatgggacgcgccctgtagcggcgcattaagcgcggcgggtgtggtggttacgcgcagcgtgaccgctacacttgccagcgccctagcgcccgctcctttcgctttcttcccttcctttctcgccacgttcgccggctttccccgtcaagctctaaatcgggggctccctttagggttccgatttagtgctttacggcacctcgaccccaaaaaacttgattagggtgatggttcacgtagtgggccatcgccctgatagacggtttttcgccctttgacgttggagtccacgttctttaatagtggactcttgttccaaactggaacaacactcaaccctatctcggtctattcttttgatttataagggattttgccgatttcggcctattggttaaaaaatgagctgatttaacaaaaatttaacgcgaattttaacaaaatattaacgcttacaatttaggtggcacttttcggggaaatgtgcgcggaacccctatttgtttatttttctaaatacattcaaatatgtatccgctcatgagacaataaccctgataaatgcttcaataatattgaaaaaggaagagtatgagtattcaacatttccgtgtcgcccttattcccttttttgcggcattttgccttcctgtttttgctcacccagaaacgctggtgaaagtaaaagatgctgaagatcagttgggtgcacgagtgggttacatcgaactggatctcaacagcggtaagatccttgagagttttcgccccgaagaacgttttccaatgatgagcacttttaaagttctgctatgtggcgcggtattatcccgtattgacgccgggcaagagcaactcggtcgccgcatacactattctcagaatgacttggttgagtactcaccagtcacagaaaagcatcttacggatggcatgacagtaagagaattatgcagtgctgccataaccatgagtgataacactgcggccaacttacttctgacaacgatcggaggaccgaaggagctaaccgcttttttgcacaacatgggggatcatgtaactcgccttgatcgttgggaaccggagctgaatgaagccataccaaacgacgagcgtgacaccacgatgcctgtagcaatggcaacaacgttgcgcaaactattaactggcgaactacttactctagcttcccggcaacaattaatagactggatggaggcggataaagttgcaggaccacttctgcgctcggcccttccggctggctggtttattgctgataaatctggagccggtgagcgtgggtctcgcggtatcattgcagcactggggccagatggtaagccctcccgtatcgtagttatctacacgacggggagtcaggcaactatggatgaacgaaatagacagatcgctgagataggtgcctcactgattaagcattggtaactgtcagaccaagtttactcatatatactttagattgatttaaaacttcatttttaatttaaaaggatctaggtgaagatcctttttgataatctcatgaccaaaatcccttaacgtgagttttcgttccactgagcgtcagaccccgtagaaaagatcaaaggatcttcttgagatcctttttttctgcgcgtaatctgctgcttgcaaacaaaaaaaccaccgctaccagcggtggtttgtttgccggatcaagagctaccaactctttttccgaaggtaactggcttcagcagagcgcagataccaaatactgttcttctagtgtagccgtagttaggccaccacttcaagaactctgtagcaccgcctacatacctcgctctgctaatcctgttaccagtggctgctgccagtggcgataagtcgtgtcttaccgggttggactcaagacgatagttaccggataaggcgcagcggtcgggctgaacggggggttcgtgcacacagcccagcttggagcgaacgacctacaccgaactgagatacctacagcgtgagctatgagaaagcgccacgcttcccgaagggagaaaggcggacaggtatccggtaagcggcagggtcggaacaggagagcgcacgagggagcttccagggggaaacgcctggtatctttatagtcctgtcgggtttcgccacctctgacttgagcgtcgatttttgtgatgctcgtcaggggggcggagcctatggaaaaacgccagcaacgcggcctttttacggttcctggccttttgctggccttttgctcacatgttctttcctgcgttatcccctgattctgtggataaccgtattaccgcctttgagtgagctgataccgctcgccgcagccgaacgaccgagcgcagcgagtcagtgagcgaggaagcggaagagcgcccaatacgcaaaccgcctctccccgcgcgttggccgattcattaatgcagctggcacgacaggtttcccgactggaaagcgggcagtgagcgcaacgcaattaatgtgagttagctcactcattaggcaccccaggctttacactttatgcttccggctcgtatgttgtgtggaattgtgagcggataacaatttcacacaggaaacagctatgaccatgattacgccagatttaattaaggc

SEQ ID NO: 1160 - protein, 737 aa, Artificial Sequence
  source: /note="Description of Artificial Sequence: Synthetic polypeptide"
  MOD_RES (264)..(264): Any amino acid
  MOD_RES (266)..(266): Any amino acid
  MOD_RES (268)..(268): Any amino acid
  MOD_RES (448)..(448): Any amino acid
  MOD_RES (459)..(460): Any amino acid
  MOD_RES (467)..(467): Any amino acid
  MOD_RES (470)..(471): Any amino acid
  MOD_RES (474)..(474): Any amino acid
  MOD_RES (495)..(495): Any amino acid
  MOD_RES (516)..(516): Any amino acid
  MOD_RES (533)..(533): Any amino acid
  MOD_RES (547)..(547): Any amino acid
  MOD_RES (551)..(551): Any amino acid
  MOD_RES (555)..(555): Any amino acid
  MOD_RES (557)..(557): Any amino acid
  MOD_RES (561)..(561): Any amino acid
  MOD_RES (563)..(563): Any amino acid
  MOD_RES (577)..(577): Any amino acid
  MOD_RES (583)..(583): Any amino acid
  MOD_RES (593)..(593): Any amino acid
  MOD_RES (596)..(596): Any amino acid
  MOD_RES (661)..(662): Any amino acid
  MOD_RES (664)..(665): Any amino acid
  MOD_RES (710)..(710): Any amino acid
  MOD_RES (717)..(719): Any amino acid
  MOD_RES (723)..(723): Any amino acid
MAADGYLPDWLEDNLSEGIREWWDLKPGAPKPKANQQKQDDGRGLVLPGYKYLGPFNGLDKGEPVNAADAAALEHDKAYDQQLKAGDNPYLRYNHADAEFQERLQEDTSFGGNLGRAVFQAKKRVLEPLGLVEEGAKTAPGKKRPVEPSPQRSPDSSTGIGKKGQQPAKKRLNFGQTGDSESVPDPQPLGEPPAGPSGLGSGTMAAGGGAPMADNNEGADGVGNASGNWHCDSTWLGDRVITTSTRTWALPTYNNHLYKQISSXSXGXTNDNHYFGYSTPWGYFDFNRFHCHFSPRDWQRLINNNWGFRPKRLNFKLFNIQVKEVTTNDGVTTIANNLTSTVQVFSDSEYQLPYVLGSAHQGCLPPFPADVFMIPQYGYLTLNNGSQAVGRSSFYCLEYFPSQMLRTGNNFTFSYTFEDVPFHSSYAHSQSLDRLMNPLIDQYLYYLXRTQSTGGTAGXXELLFSQXGPXXMSXQAKNWLPGPCYRQQRVSKTLXQNNNSNFAWTGATKYHLNGRXSLVNPGVAMATHKDDEXRFFPSSGVLIFGKXGAGXNNTXLXNVMXTXEEEIKTTNPVATEXYGVVAXNLQSSNTAPXTGXVNSQGALPGMVWQNRDVYLQGPIWAKIPHTDGNFHPSPLMGGFGLKHPPPQILIKNTPVPANPPXXFXXAKFASFITQYSTGQVSVEIEWELQKENSKRWNPEIQYTSNYAKSXNVDFAVXXXGVYXEPRPIGTRYLTRNL

SEQ ID NO: 1161 - protein, 737 aa, Artificial Sequence
  source: /note="Description of Artificial Sequence: Synthetic polypeptide"
MAADGYLPDWLEDNLSEGIREWWDLKPGAPKPKANQQKQDDGRGLVLPGYKYLGPFNGLDKGEPVNAADAAALEHDKAYDQQLKAGDNPYLRYNHADAEFQERLQEDTSFGGNLGRAVFQAKKRVLEPLGLVEEGAKTAPGKKRPVEPSPQRSPDSSTGIGKKGQQPAKKRLNFGQTGDSESVPDPQPLGEPPAGPSGLGSGTMAAGGGAPMADNNEGADGVGNASGNWHCDSTWLGDRVITTSTRTWALPTYNNHLYKQISSASSGSTNDNHYFGYSTPWGYFDFNRFHCHFSPRDWQRLINNNWGFRPKRLNFKLFNIQVKEVTTNDGVTTIANNLTSTVQVFSDSEYQLPYVLGSAHQGCLPPFPADVFMIPQYGYLTLNNGSQAVGRSSFYCLEYFPSQMLRTGNNFTFSYTFEDVPFHSSYAHSQSLDRLMNPLIDQYLYYLARTQSTGGTAGNRELLFSQGGPSNMSAQAKNWLPGPCYRQQRVSKTLAQNNNSNFAWTGATKYHLNGRDSLVNPGVAMATHKDDEDRFFPSSGVLIFGKEGAGANNTALENVMLTNEEEIKTTNPVATEQYGVVASNLQSSNTAPATGAVNSQGALPGMVWQNRDVYLQGPIWAKIPHTDGNFHPSPLMGGFGLKHPPPQILIKNTPVPANPPATFTPAKFASFITQYSTGQVSVEIEWELQKENSKRWNPEIQYTSNYAKSTNVDFAVNNEGVYSEPRPIGTRYLTRNL

SEQ ID NO: 1162 - protein, 737 aa, Artificial Sequence
  source: /note="Description of Artificial Sequence: Synthetic polypeptide"
MAADGYLPDWLEDNLSEGIREWWDLKPGAPKPKANQQKQDDGRGLVLPGYKYLGPFNGLDKGEPVNAADAAALEHDKAYDQQLKAGDNPYLRYNHADAEFQERLQEDTSFGGNLGRAVFQAKKRVLEPLGLVEEGAKTAPGKKRPVEPSPQRSPDSSTGIGKKGQQPAKKRLNFGQTGDSESVPDPQPLGEPPAGPSGLGSGTMAAGGGAPMADNNEGADGVGNASGNWHCDSTWLGDRVITTSTRTWALPTYNNHLYKQISSQSSGSTNDNHYFGYSTPWGYFDFNRFHCHFSPRDWQRLINNNWGFRPKRLNFKLFNIQVKEVTTNDGVTTIANNLTSTVQVFSDSEYQLPYVLGSAHQGCLPPFPADVFMIPQYGYLTLNNGSQAVGRSSFYCLEYFPSQMLRTGNNFTFSYTFEDVPFHSSYAHSQSLDRLMNPLIDQYLYYLSRTQSTGGTAGNRELLFSQGGPANMSAQAKNWLPGPCYRQQRVSKTLSQNNNSNFAWTGATKYHLNGRDSLVNPGVAMATHKDDEERFFPSSGVLIFGKQGAGANNTTLDNVMMTSEEEIKTTNPVATEQYGVVASNLQSSNTAPQTGTVNSQGALPGMVWQNRDVYLQGPIWAKIPHTDGNFHPSPLMGGFGLKHPPPQILIKNTPVPANPPAVFSPAKFASFITQYSTGQVSVEIEWELQKENSKRWNPEIQYTSNYAKSTNVDFAVNSEGVYSEPRPIGTRYLTRNL

SEQ ID NO: 1163 - protein, 737 aa, Artificial Sequence
  source: /note="Description of Artificial Sequence: Synthetic polypeptide"
MAADGYLPDWLEDNLSEGIREWWDLKPGAPKPKANQQKQDDGRGLVLPGYKYLGPFNGLDKGEPVNAADAAALEHDKAYDQQLKAGDNPYLRYNHADAEFQERLQEDTSFGGNLGRAVFQAKKRVLEPLGLVEEGAKTAPGKKRPVEPSPQRSPDSSTGIGKKGQQPAKKRLNFGQTGDSESVPDPQPLGEPPAGPSGLGSGTMAAGGGAPMADNNEGADGVGNASGNWHCDSTWLGDRVITTSTRTWALPTYNNHLYKQISSASSGSTNDNHYFGYSTPWGYFDFNRFHCHFSPRDWQRLINNNWGFRPKRLNFKLFNIQVKEVTTNDGVTTIANNLTSTVQVFSDSEYQLPYVLGSAHQGCLPPFPADVFMIPQYGYLTLNNGSQAVGRSSFYCLEYFPSQMLRTGNNFTFSYTFEDVPFHSSYAHSQSLDRLMNPLIDQYLYYLARTQSTGGTAGTRELLFSQGGPSNMSAQAKNWLPGPCYRQQRVSKTLTQNNNSNFAWTGATKYHLNGRDSLVNPGVAMATHKDDEDRFFPSSGVLIFGKQGAGANNTALDNVMITNEEEIKTTNPVATEQYGVVASNLQSSNTAPATGTVNSQGALPGMVWQNRDVYLQGPIWAKIPHTDGNFHPSPLMGGFGLKHPPPQILIKNTPVPANPPTVFSPAKFASFITQYSTGQVSVEIEWELQKENSKRWNPEIQYTSNYAKSTNVDFAVNSEGVYTEPRPIGTRYLTRNL

SEQ ID NO: 1164 - protein, 737 aa, Artificial Sequence
  source: /note="Description of Artificial Sequence: Synthetic polypeptide"
  MOD_RES (264)..(264): Any amino acid
  MOD_RES (448)..(448): Any amino acid
  MOD_RES (459)..(459): Any amino acid
  MOD_RES (470)..(470): Any amino acid
  MOD_RES (495)..(495): Any amino acid
  MOD_RES (533)..(533): Any amino acid
  MOD_RES (547)..(547): Any amino acid
  MOD_RES (555)..(555): Any amino acid
  MOD_RES (557)..(557): Any amino acid
  MOD_RES (561)..(561): Any amino acid
  MOD_RES (563)..(563): Any amino acid
  MOD_RES (593)..(593): Any amino acid
  MOD_RES (596)..(596): Any amino acid
  MOD_RES (661)..(662): Any amino acid
  MOD_RES (664)..(664): Any amino acid
  MOD_RES (718)..(718): Any amino acid
  MOD_RES (723)..(723): Any amino acid
MAADGYLPDWLEDNLSEGIREWWDLKPGAPKPKANQQKQDDGRGLVLPGYKYLGPFNGLDKGEPVNAADAAALEHDKAYDQQLKAGDNPYLRYNHADAEFQERLQEDTSFGGNLGRAVFQAKKRVLEPLGLVEEGAKTAPGKKRPVEPSPQRSPDSSTGIGKKGQQPAKKRLNFGQTGDSESVPDPQPLGEPPAGPSGLGSGTMAAGGGAPMADNNEGADGVGNASGNWHCDSTWLGDRVITTSTRTWALPTYNNHLYKQISSXSSGSTNDNHYFGYSTPWGYFDFNRFHCHFSPRDWQRLINNNWGFRPKRLNFKLFNIQVKEVTTNDGVTTIANNLTSTVQVFSDSEYQLPYVLGSAHQGCLPPFPADVFMIPQYGYLTLNNGSQAVGRSSFYCLEYFPSQMLRTGNNFTFSYTFEDVPFHSSYAHSQSLDRLMNPLIDQYLYYLXRTQSTGGTAGXRELLFSQGGPXNMSAQAKNWLPGPCYRQQRVSKTLXQNNNSNFAWTGATKYHLNGRDSLVNPGVAMATHKDDEXRFFPSSGVLIFGKXGAGANNTXLXNVMXTXEEEIKTTNPVATEQYGVVASNLQSSNTAPXTGXVNSQGALPGMVWQNRDVYLQGPIWAKIPHTDGNFHPSPLMGGFGLKHPPPQILIKNTPVPANPPXXFXPAKFASFITQYSTGQVSVEIEWELQKENSKRWNPEIQYTSNYAKSTNVDFAVNXEGVYXEPRPIGTRYLTRNL

SEQ ID NO: 1165 - protein, 737 aa, Artificial Sequence
  source: /note="Description of Artificial Sequence: Synthetic polypeptide"
  MOD_RES (264)..(264): Any amino acid
  MOD_RES (448)..(448): Any amino acid
  MOD_RES (470)..(470): Any amino acid
  MOD_RES (533)..(533): Any amino acid
  MOD_RES (547)..(547): Any amino acid
  MOD_RES (555)..(555): Any amino acid
  MOD_RES (557)..(557): Any amino acid
  MOD_RES (561)..(561): Any amino acid
  MOD_RES (563)..(563): Any amino acid
  MOD_RES (593)..(593): Any amino acid
  MOD_RES (596)..(596): Any amino acid
  MOD_RES (662)..(662): Any amino acid
  MOD_RES (664)..(664): Any amino acid
  MOD_RES (718)..(718): Any amino acid
MAADGYLPDWLEDNLSEGIREWWDLKPGAPKPKANQQKQDDGRGLVLPGYKYLGPFNGLDKGEPVNAADAAALEHDKAYDQQLKAGDNPYLRYNHADAEFQERLQEDTSFGGNLGRAVFQAKKRVLEPLGLVEEGAKTAPGKKRPVEPSPQRSPDSSTGIGKKGQQPAKKRLNFGQTGDSESVPDPQPLGEPPAGPSGLGSGTMAAGGGAPMADNNEGADGVGNASGNWHCDSTWLGDRVITTSTRTWALPTYNNHLYKQISSXSSGSTNDNHYFGYSTPWGYFDFNRFHCHFSPRDWQRLINNNWGFRPKRLNFKLFNIQVKEVTTNDGVTTIANNLTSTVQVFSDSEYQLPYVLGSAHQGCLPPFPADVFMIPQYGYLTLNNGSQAVGRSSFYCLEYFPSQMLRTGNNFTFSYTFEDVPFHSSYAHSQSLDRLMNPLIDQYLYYLXRTQSTGGTAGNRELLFSQGGPXNMSAQAKNWLPGPCYRQQRVSKTLSQNNNSNFAWTGATKYHLNGRDSLVNPGVAMATHKDDEXRFFPSSGVLIFGKXGAGANNTXLXNVMXTXEEEIKTTNPVATEQYGVVASNLQSSNTAPXTGXVNSQGALPGMVWQNRDVYLQGPIWAKIPHTDGNFHPSPLMGGFGLKHPPPQILIKNTPVPANPPAXFXPAKFASFITQYSTGQVSVEIEWELQKENSKRWNPEIQYTSNYAKSTNVDFAVNXEGVYSEPRPIGTRYLTRNL

SEQ ID NO: 1166 - DNA, 2217 bp, Artificial Sequence
  source: /note="Description of Artificial Sequence: Synthetic polynucleotide"
atggctgccgatggttatcttccagattggctcgaggacactctctctgaaggaataagacagtggtggaagctcaaacctggcccaccaccaccaaagcccgcagagcggcataaggacgacagcaggggtcttgtgcttcctgggtacaagtacctcggacccttcaacggactcgacaagggagagccggtcaacgaggcagacgccgcggccctcgagcacgacaaagcctacgaccggcagctcgacagcggagacaacccgtacctcaagtacaaccacgccgacgcggagtttcaggagcgccttaaagaagatacgtcttttgggggcaacctcggacgagcagtcttccaggcgaaaaagagggttcttgaacctctgggcctggttgaggaacctgttaagacggctccgggaaagaagagaccggtagagccatcaccccagcgttctccagactcctctacgggcatcggcaagaaaggccaacagcccgccagaaaaagactcaattttggtcagactggcgactcagagtcagttccagaccctcaacctctcggagaacctccagcagcgccctctggtgtgggacctaatacaatggctgcaggcggtggcgcaccaatggcagacaataacgaaggcgccgacggagtgggtagttcctcgggaaattggcattgcgattccacatggctgggcgacagagtcatcaccaccagcacccgaacctgggccctgcccacctacaacaaccacctctacaagcaaatctccaacgggacatcgggaggagccaccaacgacaacacctacttcggctacagcaccccctgggggtattttgactttaacagattccactgccacttttcaccacgtgactggcagcgactcatcaacaacaactggggattccggcccaagagactcagcttcaagctcttcaacatccaggtcaaggaggtcacgcagaatgaaggcaccaagaccatcgccaataacctcaccagcaccatccaggtgtttacggactcggagtaccagctgccgtacgttctcggctctgcccaccagggctgcctgcctccgttcccggcggacgtgttcatgattccccagtacggctacctaacactcaacaacggtagtcaggccgtgggacgctcctccttctactgcctggaatactttccttcgcagatgctgagaaccggcaacaacttccagtttacttacaccttcgaggacgtgcctttccacagcagctacgcccacagccagagcttggaccggctgatgaatcctctgattgaccagtacctgtactacttgtctcggactcaaacaacaggaggcacggcaaatacgcagactctgggcttcagccaaggtgggcctaatacaatggccaatcaggcaaagaactggctgccaggaccctgttaccgccaacaacgcgtctcaacgacaaccgggcaaaacaacaatagcaactttgcctggactgctgggaccaaataccatctgaatggaagaaattcattggctaatcctggcatcgctatggcaacacacaaagacgacgaggagcgtttttttcccagtaacgggatcctgatttttggcaaacaaaatgctgccagagacaatgcggattacagcgatgtcatgctcaccagcgaggaagaaatcaaaaccactaaccctgtggctacagaggaatacggtatcgtggcagataacttgcagcagcaaaacacggctcctcaaattggaactgtcaacagccagggggccttacccggtatggtctggcagaaccgggacgtgtacctgcagggtcccatctgggccaagattcctcacacggacggcaacttccacccgtctccgctgatgggcggctttggcctgaaacatcctccgcctcagatcctgatcaagaacacgcctgtacctgcggatcctccgaccaccttcaaccagtcaaagctgaactctttcatcacgcaatacagcaccggacaggtcagcgtggaaattgaatgggagctgcagaaggaaaacagcaagcgctggaaccccgagatccagtacacctccaactactacaaatctacaagtgtggactttgctgttaatacagaaggcgtgtactctgaaccccgccccattggcacccgttacctcacccgtaatctgtaa

SEQ ID NO: 1167 - protein, 733 aa, Artificial Sequence; identical to SEQ ID NO: 952
  source: /note="Description of Artificial Sequence: Synthetic polypeptide"

SEQ ID NO: 1168 - DNA, 2203 bp, Artificial Sequence
  source: /note="Description of Artificial Sequence: Synthetic polynucleotide"
atgtcttttgttgatcaccctccagattggttggaagaagttggtgaaggtcttcgcgagtttttgggccttgaagcgggcccaccgaaaccaaaacccaatcagcagcatcaagatcaagcccgtggtcttgtgctgcctggttataactatctcggacccggaaacggtctcgatcgaggagagcctgtcaacagggcagacgaggtcgcgcgagagcacgacatctcgtacaacgagcagcttgaggcgggagacaacccctacctcaagtacaaccacgcggacgccgagtttcaggagaagctcgccgacgacacatccttcgggggaaacctcggaaaggcagtctttcaggccaagaaaagggttctcgaaccttttggcctggttgaagagggtgctaagacggcccctaccggaaagcggatagacgaccactttccaaaaagaaagaaggctcggaccgaagaggactccaagccttccacctcgtcagacgccgaagctggacccagcggatcccagcagctgcaaatcccagcccaaccagcctcaagtttgggagctgatacaatgtctgcgggaggtggcggcccattgggcgacaataaccaaggtgccgatggagtgggcaatgcctcgggagattggcattgcgattccacgtggatgggggacagagtcgtcaccaagtccacccgaacctgggtgctgcccagctacaacaaccaccagtaccgagagatcaaaagcggctccgtcgacggaagcaacgccaacgcctactttggatacagcaccccctgggggtactttgactttaaccgcttccacagccactggagcccccgagactggcaaagactcatcaacaactactggggcttcagaccccggtccctcagagtcaaaatcttcaacattcaagtcaaagaggtcacggtgcaggactccaccaccaccatcgccaacaacctcacctccaccgtccaagtgtttacggacgacgactaccagctgccctacgtcgtcggcaacgggaccgagggatgcctgccggccttccctccgcaggtctttacgctgccgcagtacggttacgcgacgctgaaccgcgacaacacagaaaatcccaccgagaggagcagcttcttctgcctagagtactttcccagcaagatgctgagaacgggcaacaactttgagtttacctacaactttgaggaggtgcccttccactccagcttcgctcccagtcagaacctgttcaagctggccaacccgctggtggaccagtacttgtaccgcttcgtgagcacaaataacactggcggagtccagttcaacaagaacctggccgggagatacgccaacacctacaaaaactggttcccggggcccatgggccgaacccagggctggaacctgggctccggggtcaaccgcgccagtgtcagcgccttcgccacgaccaataggatggagctcgagggcgcgagttaccaggtgcccccgcagccgaacggcatgaccaacaacctccagggcagcaacacctatgccctggagaacactatgatcttcaacagccagccggcgaacccgggcaccaccgccacgtacctcgagggcaacatgctcatcaccagcgagagcgagacgcagccggtgaaccgcgtggcgtacaacgtcggcgggcaggtggccaccaacaaccagagctccaccactgcccccgcgaccggcacgtacaacctccaggaaatcgtgcccggcagcgtgtggatggagagggacgtgtacctccaaggacccatctgggccaagatcccagagacgggggcgcactttcacccctctccggccatgggcggattcggactcaaacacccaccgcccatgatgctcatcaagaacacgcctgtgcccggaaatatcaccagcttctcggacgtgcccgtcagcagcttcatcacccagtacagcaccgggcaggtcaccgtggagatggagtgggagctcaagaaggaaaactccaagaggtggaacccagagatccagtacacaaacaactacaacgacccccagtttgtggactttgccccggacagcaccggggaatacagaaccaccagacctatcggaacccgataccttacccgacccctttaacccattcatgtcgcataccctcaataaa

SEQ ID NO: 1169 - protein, 724 aa, Artificial Sequence
  source: /note="Description of Artificial Sequence: Synthetic polypeptide"
MSFVDHPPDWLEEVGEGLREFLGLEAGPPKPKPNQQHQDQARGLVLPGYNYLGPGNGLDRGEPVNRADEVAREHDISYNEQLEAGDNPYLKYNHADAEFQEKLADDTSFGGNLGKAVFQAKKRVLEPFGLVEEGAKTAPTGKRIDDHFPKRKKARTEEDSKPSTSSDAEAGPSGSQQLQIPAQPASSLGADTMSAGGGGPLGDNNQGADGVGNASGDWHCDSTWMGDRVVTKSTRTWVLPSYNNHQYREIKSGSVDGSNANAYFGYSTPWGYFDFNRFHSHWSPRDWQRLINNYWGFRPRSLRVKIFNIQVKEVTVQDSTTTIANNLTSTVQVFTDDDYQLPYVVGNGTEGCLPAFPPQVFTLPQYGYATLNRDNTENPTERSSFFCLEYFPSKMLRTGNNFEFTYNFEEVPFHSSFAPSQNLFKLANPLVDQYLYRFVSTNNTGGVQFNKNLAGRYANTYKNWFPGPMGRTQGWNLGSGVNRASVSAFATTNRMELEGASYQVPPQPNGMTNNLQGSNTYALENTMIFNSQPANPGTTATYLEGNMLITSESETQPVNRVAYNVGGQVATNNQSSTTAPATGTYNLQEIVPGSVWMERDVYLQGPIWAKIPETGAHFHPSPAMGGFGLKHPPPMMLIKNTPVPGNITSFSDVPVSSFITQYSTGQVTVEMEWELKKENSKRWNPEIQYTNNYNDPQFVDFAPDSTGEYRTTRPIGTRYLTRPL

SEQ ID NO: 1170 - DNA, 2203 bp, Artificial Sequence
  source: /note="Description of Artificial Sequence: Synthetic polynucleotide"
atgtcttttgttgatcaccctccagattggttggaagaagttggtgaaggtcttcgcgagtttttgggccttgaagcgggcccaccgaaaccaaaacccaatcagcagcatcaagatcaagcccgtggtcttgtgctgcctggttataactatctcggacccggaaacggtctcgatcgaggagagcctgtcaacagggcagacgaggtcgcgcgagagcacgacatctcgtacaacgagcagcttgaggcgggagacaacccctacctcaagtacaaccacgcggacgccgagtttcaggagaagctcgccgacgacacatccttcgggggaaacctcggaaaggcagtctttcaggccaagaaaagggttctcgaaccttttggcctggttgaagagggtgctaagacggcccctaccggaaagcggatagacgaccactttccaaaaagaaagaaggctcggaccgaagaggactccaagccttccacctcgtcagacgccgaagctggacccagcggatcccagcagctgcaaatcccagcccaaccagcctcaagtttgggagctgatacaatgtctgcgggaggtggcggcccattgggcgacaataaccaaggtgccgatggagtgggcaatgcctcgggagattggcattgcgattccacgtggatgggggacagagtcgtcaccaagtccacccgaacctgggtgctgcccagctacaacaaccaccagtaccgagagatcaaaagcggctccgtcgacggaagcaacgccaacgcctactttggatacagcaccccctgggggtactttgactttaaccgcttccacagccactggagcccccgagactggcaaagactcatcaacaactactggggcttcagaccccggtccctcagagtcaaaatcttcaacattcaagtcaaagaggtcacggtgcaggactccaccaccaccatcgccaacaacctcacctccaccgtccaagtgtttacggacgacgactaccagctgccctacgtcgtcggcaacgggaccgagggatgcctgccggccttccctccgcaggtctttacgctgccgcagtacggttacgcgacgctgaaccgcgacaacacagaaaatcccaccgagaggagcagcttcttctgcctagagtactttcccagcaagatgctgagaacgggcaacaactttgagtttacctacaactttgaggaggtgcccttccactccagcttcgctcccagtcagaacctgttcaagctggccaacccgctggtggaccagtacttgtaccgcttcgtgagcacaaataacactggcggagtccagttcaacaagaacctggccgggagatacgccaacacctacaaaaactggttcccggggcccatgggccgaacccagggctggaacctgggctccggggtcaaccgcgccagtgtcagcgccttcgccacgaccaataggatggagctcgagggcgcgagttaccaggtgcccccgcagccgaacggcatgaccaacaacctccagggcagcaacacctatgccctggagaacactatgatcttcaacagccagccggcgaacccgggcaccaccgccacgtacctcgagggcaacatgctcatcaccagcgagagcgagacgcagccggtgaaccgcgtggcgtacaacgtcggcgggcagatggccaccaacaaccagagctccaccactgcccccgcgaccggcacggtcaacctccaggaaatcgtgcccggcagcgtgtggatggagagggacgtgtacctccaaggacccatctgggccaagatcccagagacgggggcgcactttcacccctctccggccatgggcggattcggactcaaacacccaccgcccatgatgctcatcaagaacacgcctgtgcccggaaatatcaccagcttctcggacgtgcccgtcagcagcttcatcacccagtacagcaccgggcaggtcaccgtggagatggagtgggagctcaagaaggaaaactccaagaggtggaacccagagatccagtacacaaacaactacaacgacccccagtttgtggactttgccccggacagcaccggggaatacagaaccaccagacctatcggaacccgataccttacccgacccctttaacccattcatgtcgcataccctcaataaa

SEQ ID NO: 1171 - protein, 724 aa, Artificial Sequence
  source: /note="Description of Artificial Sequence: Synthetic polypeptide"
MSFVDHPPDWLEEVGEGLREFLGLEAGPPKPKPNQQHQDQARGLVLPGYNYLGPGNGLDRGEPVNRADEVAREHDISYNEQLEAGDNPYLKYNHADAEFQEKLADDTSFGGNLGKAVFQAKKRVLEPFGLVEEGAKTAPTGKRIDDHFPKRKKARTEEDSKPSTSSDAEAGPSGSQQLQIPAQPASSLGADTMSAGGGGPLGDNNQGADGVGNASGDWHCDSTWMGDRVVTKSTRTWVLPSYNNHQYREIKSGSVDGSNANAYFGYSTPWGYFDFNRFHSHWSPRDWQRLINNYWGFRPRSLRVKIFNIQVKEVTVQDSTTTIANNLTSTVQVFTDDDYQLPYVVGNGTEGCLPAFPPQVFTLPQYGYATLNRDNTENPTERSSFFCLEYFPSKMLRTGNNFEFTYNFEEVPFHSSFAPSQNLFKLANPLVDQYLYRFVSTNNTGGVQFNKNLAGRYANTYKNWFPGPMGRTQGWNLGSGVNRASVSAFATTNRMELEGASYQVPPQPNGMTNNLQGSNTYALENTMIFNSQPANPGTTATYLEGNMLITSESETQPVNRVAYNVGGQMATNNQSSTTAPATGTVNLQEIVPGSVWMERDVYLQGPIWAKIPETGAHFHPSPAMGGFGLKHPPPMMLIKNTPVPGNITSFSDVPVSSFITQYSTGQVTVEMEWELKKENSKRWNPEIQYTNNYNDPQFVDFAPDSTGEYRTTRPIGTRYLTRPL

SEQ ID NO: 1172 - DNA, 2203 bp, Artificial Sequence
  source: /note="Description of Artificial Sequence: Synthetic polynucleotide"
atgtcttttgttgatcaccctccagattggttggaagaagttggtgaaggtcttcgcgagtttttgggccttgaagcgggcccaccgaaaccaaaacccaatcagcagcatcaagatcaagcccgtggtcttgtgctgcctggttataactatctcggacccggaaacggtctcgatcgaggagagcctgtcaacagggcagacgaggtcgcgcgagagcacgacatctcgtacaacgagcagcttgaggcgggagacaacccctacctcaagtacaaccacgcggacgccgagtttcaggagaagctcgccgacgacacatccttcgggggaaacctcggaaaggcagtctttcaggccaagaaaagggttctcgaaccttttggcctggttgaagagggtgctaagacggcccctaccggaaagcggatagacgaccactttccaaaaagaaagaaggctcggaccgaagaggactccaagccttccacctcgtcagacgccgaagctggacccagcggatcccagcagctgcaaatcccagcccaaccagcctcaagtttgggagctgatacaatgtctgcgggaggtggcggcccattgggcgacaataaccaaggtgccgatggagtgggcaatgcctcgggagattggcattgcgattccacgtggatgggggacagagtcgtcaccaagtccacccgaacctgggtgctgcccagctacaacaaccaccagtaccgagagatcaaaagcggctccgtcgacggaagcaacgccaacgcctactttggatacagcaccccctgggggtactttgactttaaccgcttccacagccactggagcccccgagactggcaaagactcatcaacaactactggggcttcagaccccggtccctcagagtcaaaatcttcaacattcaagtcaaagaggtcacggtgcaggactccaccaccaccatcgccaacaacctcacctccaccgtccaagtgtttacggacgacgactaccagctgccctacgtcgtcggcaacgggaccgagggatgcctgccggccttccctccgcaggtctttacgctgccgcagtacggttacgcgacgctgaaccgcgacaacacagaaaatcccaccgagaggagcagcttcttctgcctagagtactttcccagcaagatgctgagaacgggcaacaactttgagtttacctacaactttgaggaggtgcccttccactccagcttcgctcccagtcagaacctgttcaagctggccaacccgctggtggaccagtacttgtaccgcttcgtgagcacaaataacactggcggagtccagttcaacaagaacctggccgggagatacgccaacacctacaaaaactggttcccggggcccatgggccgaacccagggctggaacctgggctccggggtcaaccgcgccagtgtcagcgccttcgccacgaccaataggatggagctcgagggcgcgagttaccaggtgcccccgcagccgaacggcatgaccaacaacctccagggcagcaacacctatgccctggagaacactatgatcttcaacagccagccggcgaacccgggcaccaccgccacgtacctcgagggcaacatgctcatcaccagcgagagcgagacgcagccggtgaaccgcgtggcgtacaacgtcggcgggcagatggccaccaacaaccagagctccaccactgcccccgcgaccggcacgtacaacacccaggaaatcgtgcccggcagcgtgtggatggagagggacgtgtacctccaaggacccatctgggccaagatcccagagacgggggcgcactttcacccctctccggccatgggcggattcggactcaaacacccaccgcccatgatgctcatcaagaacacgcctgtgcccggaaatatcaccagcttctcggacgtgcccgtcagcagcttcatcacccagtacagcaccgggcaggtcaccgtggagatggagtgggagctcaagaaggaaaactccaagaggtggaacccagagatccagtacacaaacaactacaacgacccccagtttgtggactttgccccggacagcaccggggaatacagaaccaccagacctatcggaacccgataccttacccgacccctttaacccattcatgtcgcataccctcaataaa

SEQ ID NO: 1173 - protein, 724 aa, Artificial Sequence
  source: /note="Description of Artificial Sequence: Synthetic polypeptide"
MSFVDHPPDWLEEVGEGLREFLGLEAGPPKPKPNQQHQDQARGLVLPGYNYLGPGNGLDRGEPVNRADEVAREHDISYNEQLEAGDNPYLKYNHADAEFQEKLADDTSFGGNLGKAVFQAKKRVLEPFGLVEEGAKTAPTGKRIDDHFPKRKKARTEEDSKPSTSSDAEAGPSGSQQLQIPAQPASSLGADTMSAGGGGPLGDNNQGADGVGNASGDWHCDSTWMGDRVVTKSTRTWVLPSYNNHQYREIKSGSVDGSNANAYFGYSTPWGYFDFNRFHSHWSPRDWQRLINNYWGFRPRSLRVKIFNIQVKEVTVQDSTTTIANNLTSTVQVFTDDDYQLPYVVGNGTEGCLPAFPPQVFTLPQYGYATLNRDNTENPTERSSFFCLEYFPSKMLRTGNNFEFTYNFEEVPFHSSFAPSQNLFKLANPLVDQYLYRFVSTNNTGGVQFNKNLAGRYANTYKNWFPGPMGRTQGWNLGSGVNRASVSAFATTNRMELEGASYQVPPQPNGMTNNLQGSNTYALENTMIFNSQPANPGTTATYLEGNMLITSESETQPVNRVAYNVGGQMATNNQSSTTAPATGTYNTQEIVPGSVWMERDVYLQGPIWAKIPETGAHFHPSPAMGGFGLKHPPPMMLIKNTPVPGNITSFSDVPVSSFITQYSTGQVTVEMEWELKKENSKRWNPEIQYTNNYNDPQFVDFAPDSTGEYRTTRPIGTRYLTRPL

SEQ ID NO: 1174 - DNA, 2203 bp, Artificial Sequence
  source: /note="Description of Artificial Sequence: Synthetic polynucleotide"
atgtcttttgttgatcaccctccagattggttggaagaagttggtgaaggtcttcgcgagtttttgggccttgaagcgggcccaccgaaaccaaaacccaatcagcagcatcaagatcaagcccgtggtcttgtgctgcctggttataactatctcggacccggaaacggtctcgatcgaggagagcctgtcaacagggcagacgaggtcgcgcgagagcacgacatctcgtacaacgagcagcttgaggcgggagacaacccctacctcaagtacaaccacgcggacgccgagtttcaggagaagctcgccgacgacacatccttcgggggaaacctcggaaaggcagtctttcaggccaagaaaagggttctcgaaccttttggcctggttgaagagggtgctaagacggcccctaccggaaagcggatagacgaccactttccaaaaagaaagaaggctcggaccgaagaggactccaagccttccacctcgtcagacgccgaagctggacccagcggatcccagcagctgcaaatcccagcccaaccagcctcaagtttgggagctgatacaatgtctgcgggaggtggcggcccattgggcgacaataaccaaggtgccgatggagtgggcaatgcctcgggagattggcattgcgattccacgtggatgggggacagagtcgtcaccaagtccacccgaacctgggtgctgcccagctacaacaaccaccagtaccgagagatcaaaagcggctccgtcgacggaagcaacgccaacgcctactttggatacagcaccccctgggggtactttgactttaaccgcttccacagccactggagcccccgagactggcaaagactcatcaacaactactggggcttcagaccccggtccctcagagtcaaaatcttcaacattcaagtcaaagaggtcacggtgcaggactccaccaccaccatcgccaacaacctcacctccaccgtccaagtgtttacggacgacgactaccagctgccctacgtcgtcggcaacgggaccgagggatgcctgccggccttccctccgcaggtctttacgctgccgcagtacggttacgcgacgctgaaccgcgacaacacagaaaatcccaccgagaggagcagcttcttctgcctagagtactttcccagcaagatgctgagaacgggcaacaactttgagtttacctacaactttgaggaggtgcccttccactccagcttcgctcccagtcagaacctgttcaagctggccaacccgctggtggaccagtacttgtaccgcttcgtgagcacaaataacactggcggagtccagttcaacaagaacctggccgggagatacgccaacacctacaaaaactggttcccggggcccatgggccgaacccagggctggaacctgggctccggggtcaaccgcgccagtgtcagcgccttcgccacgaccaataggatggagctcgagggcgcgagttaccaggtgcccccgcagccgaacggcatgaccaacaacctccagggcagcaacacctatgccctggagaacactatgatcttcaacagccagccggcgaacccgggcaccaccgccacgtacctcgagggcaacatgctcatcaccagcgagagcgagacgcagccggtgaaccgcgtggcgtacaacgtcggcgggcagatggccaccaacaaccagagctccaccactgcccccgcgaccggcacggtcaacacccaggaaatcgtgcccggcagcgtgtggatggagagggacgtgtacctccaaggacccatctgggccaagatcccagagacgggggcgcactttcacccctctccggccatgggcggattcggactcaaacacccaccgcccatgatgctcatcaagaacacgcctgtgcccggaaatatcaccagcttctcggacgtgcccgtcagcagcttcatcacccagtacagcaccgggcaggtcaccgtggagatggagtgggagctcaagaaggaaaactccaagaggtggaacccagagatccagtacacaaacaactacaacgacccccagtttgtggactttgccccggacagcaccggggaatacagaaccaccagacctatcggaacccgataccttacccgacccctttaacccattcatgtcgcataccctcaataaa

SEQ ID NO: 1175 - protein, 724 aa, Artificial Sequence
  source: /note="Description of Artificial Sequence: Synthetic polypeptide"
MSFVDHPPDWLEEVGEGLREFLGLEAGPPKPKPNQQHQDQARGLVLPGYNYLGPGNGLDRGEPVNRADEVAREHDISYNEQLEAGDNPYLKYNHADAEFQEKLADDTSFGGNLGKAVFQAKKRVLEPFGLVEEGAKTAPTGKRIDDHFPKRKKARTEEDSKPSTSSDAEAGPSGSQQLQIPAQPASSLGADTMSAGGGGPLGDNNQGADGVGNASGDWHCDSTWMGDRVVTKSTRTWVLPSYNNHQYREIKSGSVDGSNANAYFGYSTPWGYFDFNRFHSHWSPRDWQRLINNYWGFRPRSLRVKIFNIQVKEVTVQDSTTTIANNLTSTVQVFTDDDYQLPYVVGNGTEGCLPAFPPQVFTLPQYGYATLNRDNTENPTERSSFFCLEYFPSKMLRTGNNFEFTYNFEEVPFHSSFAPSQNLFKLANPLVDQYLYRFVSTNNTGGVQFNKNLAGRYANTYKNWFPGPMGRTQGWNLGSGVNRASVSAFATTNRMELEGASYQVPPQPNGMTNNLQGSNTYALENTMIFNSQPANPGTTATYLEGNMLITSESETQPVNRVAYNVGGQMATNNQSSTTAPATGTVNTQEIVPGSVWMERDVYLQGPIWAKIPETGAHFHPSPAMGGFGLKHPPPMMLIKNTPVPGNITSFSDVPVSSFITQYSTGQVTVEMEWELKKENSKRWNPEIQYTNNYNDPQFVDFAPDSTGEYRTTRPIGTRYLTRPL

SEQ ID NO: 1176 - DNA, 2203 bp, Artificial Sequence
  source: /note="Description of Artificial Sequence: Synthetic polynucleotide"
atgtcttttgttgatcaccctccagattggttggaagaagttggtgaaggtcttcgcgagtttttgggccttgaagcgggcccaccgaaaccaaaacccaatcagcagcatcaagatcaagcccgtggtcttgtgctgcctggttataactatctcggacccggaaacggtctcgatcgaggagagcctgtcaacagggcagacgaggtcgcgcgagagcacgacatctcgtacaacgagcagcttgaggcgggagacaacccctacctcaagtacaaccacgcggacgccgagtttcaggagaagctcgccgacgacacatccttcgggggaaacctcggaaaggcagtctttcaggccaagaaaagggttctcgaaccttttggcctggttgaagagggtgctaagacggcccctaccggaaagcggatagacgaccactttccaaaaagaaagaaggctcggaccgaagaggactccaagccttccacctcgtcagacgccgaagctggacccagcggatcccagcagctgcaaatcccagcccaaccagcctcaagtttgggagctgatacaatgtctgcgggaggtggcggcccattgggcgacaataaccaaggtgccgatggagtgggcaatgcctcgggagattggcattgcgattccacgtggatgggggacagagtcgtcaccaagtccacccgaacctgggtgctgcccagctacaacaaccaccagtaccgagagatcaaaagcggctccgtcgacggaagcaacgccaacgcctactttggatacagcaccccctgggggtactttgactttaaccgcttccacagccactggagcccccgagactggcaaagactcatcaacaactactggggcttcagaccccggtccctcagagtcaaaatcttcaacattcaagtcaaagaggtcacggtgcaggactccaccaccaccatcgccaacaacctcacctccaccgtccaagtgtttacggacgacgactaccagctgccctacgtcgtcggcaacgggaccgagggatgcctgccggccttccctccgcaggtctttacgctgccgcagtacggttacgcgacgctgaaccgcgacaacacagaaaatcccaccgagaggagcagcttcttctgcctagagtactttcccagcaagatgctgagaacgggcaacaactttgagtttacctacaactttgaggaggtgcccttccactccagcttcgctcccagtcagaacctgttcaagctggccaacccgctggtggaccagtacttgtaccgcttcgtgagcacaaataacactggcggagtccagttcaacaagaacctggccgggagatacgccaacacctacaaaaactggttcccggggcccatgggccgaacccagggctggaacctgggctccggggtcaaccgcgccagtgtcagcgccttcgccacgaccaataggatggagctcgagggcgcgagttaccaggtgcccccgcagccgaacggcatgaccaacaacctccagggcagcaacacctatgccctggagaacactatgatcttcaacagccagccggcgaacccgggcaccaccgccacgtacctcgagggcaacatgctcatcaccagcgagagcgagacgcagccggtgaaccgcgtggcgtacaacgtcggcgggcagatggccaccaacaaccagagctccaccactgcccccgcgaccggcacgtacaacctccaggaaatcgtgcccggcagcgtgtggatggagagggacgtgtacctccaaggacccatctgggccaagatcccagagacgggggcgcactttcacccctctccggccatgggcggattcggactcaaacacccaccgcccatgatgctcatcaagaacacgcctgtgcccggaaatatcaccagcttctcggccgtgcccgtcagcagcttcatcacccagtacagcaccgggcaggtcaccgtggagatggagtgggagctcaagaaggaaaactccaagaggtggaacccagagatccagtacacaaacaactacaacgacccccagtttgtggactttgccccggacagcaccggggaatacagaaccaccagacctatcggaacccgataccttacccgacccctttaacccattcatgtcgcataccctcaataaa

SEQ ID NO: 1177 - protein, 724 aa, Artificial Sequence
  source: /note="Description of Artificial Sequence: Synthetic polypeptide"
MSFVDHPPDWLEEVGEGLREFLGLEAGPPKPKPNQQHQDQARGLVLPGYNYLGPGNGLDRGEPVNRADEVAREHDISYNEQLEAGDNPYLKYNHADAEFQEKLADDTSFGGNLGKAVFQAKKRVLEPFGLVEEGAKTAPTGKRIDDHFPKRKKARTEEDSKPSTSSDAEAGPSGSQQLQIPAQPASSLGADTMSAGGGGPLGDNNQGADGVGNASGDWHCDSTWMGDRVVTKSTRTWVLPSYNNHQYREIKSGSVDGSNANAYFGYSTPWGYFDFNRFHSHWSPRDWQRLINNYWGFRPRSLRVKIFNIQVKEVTVQDSTTTIANNLTSTVQVFTDDDYQLPYVVGNGTEGCLPAFPPQVFTLPQYGYATLNRDNTENPTERSSFFCLEYFPSKMLRTGNNFEFTYNFEEVPFHSSFAPSQNLFKLANPLVDQYLYRFVSTNNTGGVQFNKNLAGRYANTYKNWFPGPMGRTQGWNLGSGVNRASVSAFATTNRMELEGASYQVPPQPNGMTNNLQGSNTYALENTMIFNSQPANPGTTATYLEGNMLITSESETQPVNRVAYNVGGQMATNNQSSTTAPATGTYNLQEIVPGSVWMERDVYLQGPIWAKIPETGAHFHPSPAMGGFGLKHPPPMMLIKNTPVPGNITSFSAVPVSSFITQYSTGQVTVEMEWELKKENSKRWNPEIQYTNNYNDPQFVDFAPDSTGEYRTTRPIGTRYLTRPL

SEQ ID NO: 1178 - DNA, 2203 bp, Artificial Sequence
  source: /note="Description of Artificial Sequence: Synthetic polynucleotide"
atgtcttttgttgatcaccctccagattggttggaagaagttggtgaaggtcttcgcgagtttttgggccttgaagcgggcccaccgaaaccaaaacccaatcagcagcatcaagatcaagcccgtggtcttgtgctgcctggttataactatctcggacccggaaacggtctcgatcgaggagagcctgtcaacagggcagacgaggtcgcgcgagagcacgacatctcgtacaacgagcagcttgaggcgggagacaacccctacctcaagtacaaccacgcggacgccgagtttcaggagaagctcgccgacgacacatccttcgggggaaacctcggaaaggcagtctttcaggccaagaaaagggttctcgaaccttttggcctggttgaagagggtgctaagacggcccctaccggaaagcggatagacgaccactttccaaaaagaaagaaggctcggaccgaagaggactccaagccttccacctcgtcagacgccgaagctggacccagcggatcccagcagctgcaaatcccagcccaaccagcctcaagtttgggagctgatacaatgtctgcgggaggtggcggcccattgggcgacaataaccaaggtgccgatggagtgggcaatgcctcgggagattggcattgcgattccacgtggatgggggacagagtcgtcaccaagtccacccgaacctgggtgctgcccagctacaacaaccaccagtaccgagagatcaaaagcggctccgtcgacggaagcaacgccaacgcctactttggatacagcaccccctgggggtactttgactttaaccgcttccacagccactggagcccccgagactggcaaagactcatcaacaactactggggcttcagaccccggtccctcagagtcaaaatcttcaacattcaagtcaaagaggtcacggtgcaggactccaccaccaccatcgccaacaacctcacctccaccgtccaagtgtttatggacgacgactaccagctgccctacgtcgtcggcaacgggaccgagggatgcctgccggccttccctccgcaggtctttacgctgccgcagtacggttacgcgacgctgaaccgcgacaacacagaaaatcccaccgagaggagcagcttcttctgcctagagtactttcccagcaagatgctgagaacgggcaacaactttgagtttacctacaactttgaggaggtgcccttccactccagcttcgctcccagtcagaacctgttcaagctggccaacccgctggtggaccagtacttgtaccgcttcgtgagcacaaataacactggcggagtccagttcaacaagaacctggccgggagatacgccaacacctacaaaaactggttcccggggcccatgggccgaacccagggctggaacctgggctccggggtcaaccgcgccagtgtcagcgccttcgccacgaccaataggatggagctcgagggcgcgagttaccaggtgcccccgcagccgaacggcatgaccaacaacctccagggcagcaacacctatgccctggagaacactatgatcttcaacagccagccggcgaacccgggcaccaccgccacgtacctcgagggcaacatgctcatcaccagcgagagcgagacgcagccggtgaaccgcgtggcgtacaacgtcggcgggcagatggccaccaacaaccagagctccaccactgcccccgcgaccggcacgtacaacctccaggaaatcgtgcccggcagcgtgtggatggagagggacgtgtacctccaaggacccatctgggccaagatcccagagacgggggcgcactttcacccctctccggccatgggcggattcggactcaaacacccaccgcccatgatgctcatcaagaacacgcctgtgcccggaaatatcaccagcttctcggacgtgcccgtcagcagcttcatcacccagtacagcaccgggcaggtcaccgtggagatggagtgggagctcaagaaggaaaactccaagaggtggaacccagagatccagtacacaaacaactacaacgacccccagtttgtggactttgccccggacagcaccggggaatacagaaccaccagacctatcggaacccgataccttacccgacccctttaacccattcatgtcgcataccctcaataaa

SEQ ID NO: 1179 - protein, 724 aa, Artificial Sequence
  source: /note="Description of Artificial Sequence: Synthetic polypeptide"
MSFVDHPPDWLEEVGEGLREFLGLEAGPPKPKPNQQHQDQARGLVLPGYNYLGPGNGLDRGEPVNRADEVAREHDISYNEQLEAGDNPYLKYNHADAEFQEKLADDTSFGGNLGKAVFQAKKRVLEPFGLVEEGAKTAPTGKRIDDHFPKRKKARTEEDSKPSTSSDAEAGPSGSQQLQIPAQPASSLGADTMSAGGGGPLGDNNQGADGVGNASGDWHCDSTWMGDRVVTKSTRTWVLPSYNNHQYREIKSGSVDGSNANAYFGYSTPWGYFDFNRFHSHWSPRDWQRLINNYWGFRPRSLRVKIFNIQVKEVTVQDSTTTIANNLTSTVQVFMDDDYQLPYVVGNGTEGCLPAFPPQVFTLPQYGYATLNRDNTENPTERSSFFCLEYFPSKMLRTGNNFEFTYNFEEVPFHSSFAPSQNLFKLANPLVDQYLYRFVSTNNTGGVQFNKNLAGRYANTYKNWFPGPMGRTQGWNLGSGVNRASVSAFATTNRMELEGASYQVPPQPNGMTNNLQGSNTYALENTMIFNSQPANPGTTATYLEGNMLITSESETQPVNRVAYNVGGQMATNNQSSTTAPATGTYNLQEIVPGSVWMERDVYLQGPIWAKIPETGAHFHPSPAMGGFGLKHPPPMMLIKNTPVPGNITSFSDVPVSSFITQYSTGQVTVEMEWELKKENSKRWNPEIQYTNNYNDPQFVDFAPDSTGEYRTTRPIGTRYLTRPL

SEQ ID NO: 1180 - DNA, 2203 bp, Artificial Sequence
  source: /note="Description of Artificial Sequence: Synthetic polynucleotide"
atgtcttttgttgatcaccctccagattggttggaagaagttggtgaaggtcttcgcgagtttttgggccttgaagcgggcccaccgaaaccaaaacccaatcagcagcatcaagatcaagcccgtggtcttgtgctgcctggttataactatctcggacccggaaacggtctcgatcgaggagagcctgtcaacagggcagacgaggtcgcgcgagagcacgacatctcgtacaacgagcagcttgaggcgggagacaacccctacctcaagtacaaccacgcggacgccgagtttcaggagaagctcgccgacgacacatccttcgggggaaacctcggaaaggcagtctttcaggccaagaaaagggttctcgaaccttttggcctggttgaagagggtgctaagacggcccctaccggaaagcggatagacgaccactttccaaaaagaaagaaggctcggaccgaagaggactccaagccttccacctcgtcagacgccgaagctggacccagcggatcccagcagctgcaaatcccagcccaaccagcctcaagtttgggagctgatacaatgtctgcgggaggtggcggcccattgggcgacaataaccaaggtgccgatggagtgggcaatgcctcgggagattggcattgcgattccacgtggatgggggacagagtcgtcaccaagtccacccgaacctgggtgctgcccagctacaacaaccaccagtaccgagagatcaaaagcggctccgtcgacggaagcaacgccaacgcctactttggatacagcaccccctgggggtactttgactttaaccgcttccacagccactggagcccccgagactggcaaagactcatcaacaactactggggcttcagaccccggtccctcagagtcaaaatcttcaacattcaagtcaaagaggtcacggtgcaggactccaccaccaccatcgccaacaacctcacctccaccgtcgatgtgtttacggacgacgactaccagctgccctacgtcgtcggcaacgggaccgagggatgcctgccggccttccctccgcaggtctttacgctgccgcagtacggttacgcgacgctgaaccgcgacaacacagaaaatcccaccgagaggagcagcttcttctgcctagagtactttcccagcaagatgctgagaacgggcaacaactttgagtttacctacaactttgaggaggtgcccttccactccagcttcgctcccagtcagaacctgttcaagctggccaacccgctggtggaccagtacttgtaccgcttcgtgagcacaaataacactggcggagtccagttcaacaagaacctggccgggagatacgccaacacctacaaaaactggttcccggggcccatgggccgaacccagggctggaacctgggctccggggtcaaccgcgccagtgtcagcgccttcgccacgaccaataggatggagctcgagggcgcgagttaccaggtgcccccgcagccgaacggcatgaccaacaacctccagggcagcaacacctatgccctggagaacactatgatcttcaacagccagccggcgaacccgggcaccaccgccacgtacctcgagggcaacatgctcatcaccagcgagagcgagacgcagccggtgaaccgcgtggcgtacaacgtcggcgggcagatggccaccaacaaccagagctccaccactgcccccgcgaccggcacgtacaacctccaggaaatcgtgcccggcagcgtgtggatggagagggacgtgtacctccaaggacccatctgggccaagatcccagagacgggggcgcactttcacccctctccggccatgggcggattcggactcaaacacccaccgcccatgatgctcatcaagaacacgcctgtgcccggaaatatcaccagcttctcggacgtgcccgtcagcagcttcatcacccagtacagcaccgggcaggtcaccgtggagatggagtgggagctcaagaaggaaaactccaagaggtggaacccagagatccagtacacaaacaactacaacgacccccagtttgtggactttgccccggacagcaccggggaatacagaaccaccagacctatcggaacccgataccttacccgacccctttaacccattcatgtcgcataccctcaataaa

SEQ ID NO: 1181 - protein, 724 aa, Artificial Sequence
  source: /note="Description of Artificial Sequence: Synthetic polypeptide"
MSFVDHPPDWLEEVGEGLREFLGLEAGPPKPKPNQQHQDQARGLVLPGYNYLGPGNGLDRGEPVNRADEVAREHDISYNEQLEAGDNPYLKYNHADAEFQEKLADDTSFGGNLGKAVFQAKKRVLEPFGLVEEGAKTAPTGKRIDDHFPKRKKARTEEDSKPSTSSDAEAGPSGSQQLQIPAQPASSLGADTMSAGGGGPLGDNNQGADGVGNASGDWHCDSTWMGDRVVTKSTRTWVLPSYNNHQYREIKSGSVDGSNANAYFGYSTPWGYFDFNRFHSHWSPRDWQRLINNYWGFRPRSLRVKIFNIQVKEVTVQDSTTTIANNLTSTVDVFTDDDYQLPYVVGNGTEGCLPAFPPQVFTLPQYGYATLNRDNTENPTERSSFFCLEYFPSKMLRTGNNFEFTYNFEEVPFHSSFAPSQNLFKLANPLVDQYLYRFVSTNNTGGVQFNKNLAGRYANTYKNWFPGPMGRTQGWNLGSGVNRASVSAFATTNRMELEGASYQVPPQPNGMTNNLQGSNTYALENTMIFNSQPANPGTTATYLEGNMLITSESETQPVNRVAYNVGGQMATNNQSSTTAPATGTYNLQEIVPGSVWMERDVYLQGPIWAKIPETGAHFHPSPAMGGFGLKHPPPMMLIKNTPVPGNITSFSDVPVSSFITQYSTGQVTVEMEWELKKENSKRWNPEIQYTNNYNDPQFVDFAPDSTGEYRTTRPIGTRYLTRPL

SEQ ID NO: 1182 - DNA, 2203 bp, Artificial Sequence
  source: /note="Description of Artificial Sequence: Synthetic polynucleotide"
atgtcttttgttgatcaccctccagattggttggaagaagttggtgaaggtcttcgcgagtttttgggccttgaagcgggcccaccgaaaccaaaacccaatcagcagcatcaagatcaagcccgtggtcttgtgctgcctggttataactatctcggacccggaaacggtctcgatcgaggagagcctgtcaacagggcagacgaggtcgcgcgagagcacgacatctcgtacaacgagcagcttgaggcgggagacaacccctacctcaagtacaaccacgcggacgccgagtttcaggagaagctcgccgacgacacatccttcgggggaaacctcggaaaggcagtctttcaggccaagaaaagggttctcgaaccttttggcctggttgaagagggtgctaagacggcccctaccggaaagcggatagacgaccactttccaaaaagaaagaaggctcggaccgaagaggactccaagccttccacctcgtcagacgccgaagctggacccagcggatcccagcagctgcaaatcccagcccaaccagcctcaagtttgggagctgatacaatgtctgcgggaggtggcggcccattgggcgacaataaccaaggtgccgatggagtgggcaatgcctcgggagattggcattgcgattccacgtggatgggggacagagtcgtcaccaagtccacccgaacctgggtgctgcccagctacaacaaccaccagtaccgagagatcaaaagcggctccgtcgacggaagcaacgccaacgcctactttggatacagcaccccctgggggtactttgactttaaccgcttccacagccactggagcccccgagactggcaaagactcatcaacaactactggggcttcagaccccggtccctcagagtcaaaatcttcaacattcaagtcaaagaggtcacggtgcaggactccaccaccaccatcgccaacaacctcacctccaccgtccaagtgtttacggacgacgactaccagctgccctacgtcgtcggcaacgggacccagggatgcctgccggccttccctccgcaggtctttacgctgccgcagtacggttacgcgacgctgaaccgcgacaacacagaaaatcccaccgagaggagcagcttcttctgcctagagtactttcccagcaagatgctgagaacgggcaacaactttgagtttacctacaactttgaggaggtgcccttccactccagcttcgctcccagtcagaacctgttcaagctggccaacccgctggtggaccagtacttgtaccgcttcgtgagcacaaataacactggcggagtccagttcaacaagaacctggccgggagatacgccaacacctacaaaaactggttcccggggcccatgggccgaacccagggctggaacctgggctccggggtcaaccgcgccagtgtcagcgccttcgccacgaccaataggatggagctcgagggcgcgagttaccaggtgcccccgcagccgaacggcatgaccaacaacctccagggcagcaacacctatgccctggagaacactatgatcttcaacagccagccggcgaacccgggcaccaccgccacgtacctcgagggcaacatgctcatcaccagcgagagcgagacgcagccggtgaaccgcgtggcgtacaacgtcggcgggcagatggccaccaacaaccagagctccaccactgcccccgcgaccggcacgtacaacctccaggaaatcgtgcccggcagcgtgtggatggagagggacgtgtacctccaaggacccatctgggccaagatcccagagacgggggcgcactttcacccctctccggccatgggcggattcggactcaaacacccaccgcccatgatgctcatcaagaacacgcctgtgcccggaaatatcaccagcttctcggacgtgcccgtcagcagcttcatcacccagtacagcaccgggcaggtcaccgtggagatggagtgggagctcaagaaggaaaactccaagaggtggaacccagagatccagtacacaaacaactacaacgacccccagtttgtggactttgccccggacagcaccggggaatacagaaccaccagacctatcggaacccgataccttacccgacccctttaacccattcatgtcgcataccctcaataaa

SEQ ID NO: 1183 - protein, 724 aa, Artificial Sequence
  source: /note="Description of Artificial Sequence: Synthetic polypeptide"
MSFVDHPPDWLEEVGEGLREFLGLEAGPPKPKPNQQHQDQARGLVLPGYNYLGPGNGLDRGEPVNRADEVAREHDISYNEQLEAGDNPYLKYNHADAEFQEKLADDTSFGGNLGKAVFQAKKRVLEPFGLVEEGAKTAPTGKRIDDHFPKRKKARTEEDSKPSTSSDAEAGPSGSQQLQIPAQPASSLGADTMSAGGGGPLGDNNQGADGVGNASGDWHCDSTWMGDRVVTKSTRTWVLPSYNNHQYREIKSGSVDGSNANAYFGYSTPWGYFDFNRFHSHWSPRDWQRLINNYWGFRPRSLRVKIFNIQVKEVTVQDSTTTIANNLTSTVQVFTDDDYQLPYVVGNGTQGCLPAFPPQVFTLPQYGYATLNRDNTENPTERSSFFCLEYFPSKMLRTGNNFEFTYNFEEVPFHSSFAPSQNLFKLANPLVDQYLYRFVSTNNTGGVQFNKNLAGRYANTYKNWFPGPMGRTQGWNLGSGVNRASVSAFATTNRMELEGASYQVPPQPNGMTNNLQGSNTYALENTMIFNSQPANPGTTATYLEGNMLITSESETQPVNRVAYNVGGQMATNNQSSTTAPATGTYNLQEIVPGSVWMERDVYLQGPIWAKIPETGAHFHPSPAMGGFGLKHPPPMMLIKNTPVPGNITSFSDVPVSSFITQYSTGQVTVEMEWELKKENSKRWNPEIQYTNNYNDPQFVDFAPDSTGEYRTTRPIGTRYLTRPL

SEQ ID NO: 1184 - DNA, 2203 bp, Artificial Sequence
  source: /note="Description of Artificial Sequence: Synthetic polynucleotide"
atgtcttttgttgatcaccctccagattggttggaagaagttggtgaaggtcttcgcgagtttttgggccttgaagcgggcccaccgaaaccaaaacccaatcagcagcatcaagatcaagcccgtggtcttgtgctgcctggttataactatctcggacccggaaacggtctcgatcgaggagagcctgtcaacagggcagacgaggtcgcgcgagagcacgacatctcgtacaacgagcagcttgaggcgggagacaacccctacctcaagtacaaccacgcggacgccgagtttcaggagaagctcgccgacgacacatccttcgggggaaacctcggaaaggcagtctttcaggccaagaaaagggttctcgaaccttttggcctggttgaagagggtgctaagacggcccctaccggaaagcggatagacgaccactttccaaaaagaaagaaggctcggaccgaagaggactccaagccttccacctcgtcagacgccgaagctggacccagcggatcccagcagctgcaaatcccagcccaaccagcctcaagtttgggagctgatacaatgtctgcgggaggtggcggcccattgggcgacaataaccaaggtgccgatggagtgggcaatgcctcgggagattggcattgcgattccacgtggatgggggacagagtcgtcaccaagtccacccgaacctgggtgctgcccagctacaacaaccaccagtaccgagagatcaaaagcggctccgtcgacggaagcaacgccaacgcctactttggatacagcaccccctgggggtactttgactttaaccgcttccacagccactggagcccccgagactggcaaagactcatcaacaactactggggcttcagaccccggtccctcagagtcaaaatcttcaacattcaagtcaaagaggtcacggtgcaggactccaccaccaccatcgccaacaacctcacctccaccgtccaagtgtttacggacgacgactaccagctgccctacgtcgtcggcaacgggaccgagggatgcctgccggccttccctccgcaggtctttacgctgccgcagtacggttacgcgacgctgaaccgcgacaacacagaaaatcccaccgagaggagcagcttcttctgcctagagtactttcccagcaagatgctgagaacgggcaacaactttgagtttacctacaactttgaggaggtgcccttccactccagcttcgctcccagtcagaacctgttcaagctggccaacccgctggtggaccagtacttgtaccgcttcgtgagcacaaataacactggcggagtccagttcaacaagaacctggccgggagatacgccaacacctacaaaaactggttcccggggcccatgggccgaacccagggctggaacctgggctccggggtcaaccgcgccagtgtcagcgccttcgccacgaccaataggatggagctcgagggcgcgagttaccaggtgcccccgcagccgaacggcatgaccaacaacctccagggcagcaacacctatgccctggagaacactatgatcttcaacagccagtcggcgaacccgggcaccaccgccacgtacctcgagggcaacatgctcatcaccagcgagagcgagacgcagccggtgaaccgcgtggcgtacaacgtcggcgggcagatggccaccaacaaccagagctccaccactgcccccgcgaccggcacgtacaacctccaggaaatcgtgcccggcagcgtgtggatggagagggacgtgtacctccaaggacccatctgggccaagatcccagagacgggggcgcactttcacccctctccggccatgggcggattcggactcaaacacccaccgcccatgatgctcatcaagaacacgcctgtgcccggaaatatcaccagcttctcggacgtgcccgtcagcagcttcatcacccagtacagcaccgggcaggtcaccgtggagatggagtgggagctcaagaaggaaaactccaagaggtggaacccagagatccagtacacaaacaactacaacgacccccagtttgtggactttgccccggacagcaccggggaatacagaaccaccagacctatcggaacccgataccttacccgacccctttaacccattcatgtcgcataccctcaataaa

SEQ ID NO: 1185 - protein, 724 aa, Artificial Sequence
  source: /note="Description of Artificial Sequence: Synthetic polypeptide"
MSFVDHPPDWLEEVGEGLREFLGLEAGPPKPKPNQQHQDQARGLVLPGYNYLGPGNGLDRGEPVNRADEVAREHDISYNEQLEAGDNPYLKYNHADAEFQEKLADDTSFGGNLGKAVFQAKKRVLEPFGLVEEGAKTAPTGKRIDDHFPKRKKARTEEDSKPSTSSDAEAGPSGSQQLQIPAQPASSLGADTMSAGGGGPLGDNNQGADGVGNASGDWHCDSTWMGDRVVTKSTRTWVLPSYNNHQYREIKSGSVDGSNANAYFGYSTPWGYFDFNRFHSHWSPRDWQRLINNYWGFRPRSLRVKIFNIQVKEVTVQDSTTTIANNLTSTVQVFTDDDYQLPYVVGNGTEGCLPAFPPQVFTLPQYGYATLNRDNTENPTERSSFFCLEYFPSKMLRTGNNFEFTYNFEEVPFHSSFAPSQNLFKLANPLVDQYLYRFVSTNNTGGVQFNKNLAGRYANTYKNWFPGPMGRTQGWNLGSGVNRASVSAFATTNRMELEGASYQVPPQPNGMTNNLQGSNTYALENTMIFNSQSANPGTTATYLEGNMLITSESETQPVNRVAYNVGGQMATNNQSSTTAPATGTYNLQEIVPGSVWMERDVYLQGPIWAKIPETGAHFHPSPAMGGFGLKHPPPMMLIKNTPVPGNITSFSDVPVSSFITQYSTGQVTVEMEWELKKENSKRWNPEIQYTNNYNDPQFVDFAPDSTGEYRTTRPIGTRYLTRPL

SEQ ID NO: 1186 - DNA, 2203 bp, Artificial Sequence
  source: /note="Description of Artificial Sequence: Synthetic polynucleotide"
atgtcttttgttgatcaccctccagattggttggaagaagttggtgaaggtcttcgcgagtttttgggccttgaagcgggcccaccgaaaccaaaacccaatcagcagcatcaagatcaagcccgtggtcttgtgctgcctggttataactatctcggacccggaaacggtctcgatcgaggagagcctgtcaacagggcagacgaggtcgcgcgagagcacgacatctcgtacaacgagcagcttgaggcgggagacaacccctacctcaagtacaaccacgcggacgccgagtttcaggagaagctcgccgacgacacatccttcgggggaaacctcggaaaggcagtctttcaggccaagaaaagggttctcgaaccttttggcctggttgaagagggtgctaagacggcccctaccggaaagcggatagacgaccactttccaaaaagaaagaaggctcggaccgaagaggactccaagccttccacctcgtcagacgccgaagctggacccagcggatcccagcagctgcaaatcccagcccaaccagcctcaagtttgggagctgatacaatgtctgcgggaggtggcggcccattgggcgacaataaccaaggtgccgatggagtgggcaatgcctcgggagattggcattgcgattccacgtggatgggggacagagtcgtcaccaagtccacccgaacctgggtgctgcccagctacaacaaccaccagtaccgagagatcaaaagcggctccgtcgacggaagcaacgccaacgcctactttggatacagcaccccctgggggtactttgactttaaccgcttccacagccactggagcccccgagactggcaaagactcatcaacaactactggggcttcagaccccggtccctcagagtcaaaatcttcaacattcaagtcaaagaggtcacggtgcaggactccaccaccaccatcgccaacaacctcacctccaccgtccaagtgtttacggacgacgactaccagctgccctacgtcgtcggcaacgggaccgagggatgcctgccggccttccctccgcaggtctttacgctgccgcagtacggttacgcgacgctgaaccgcgacaacacagaaaatcccaccgagaggagcagcttcttctgcctagagtactttcccagcaagatgctgagaacgggcaacaactttgagtttacctacaactttgaggaggtgcccttccactccagcttcgctcccagtcagaacctgttcaagctggccaacccgctggtggaccagtacttgtaccgcttcgtgagcacaaataacactggcggagtccagttcaacaagaacctggccgggagatacgccaacacctacaaaaactggttcccggggcccatgggccgaacccagggctggaacctgggctccggggtcaaccgcgccagtgtcagcgccttcgccacgaccaataggatggagctcgagggcgcgagttaccaggtgcccccgcagccgaacggcatgaccaacaacctccagggcagcaacacctatgccctggagaacactatgatcttcaacagccagggggcgaacccgggcaccaccgccacgtacctcgagggcaacatgctcatcaccagcgagagcgagacgcagccggtgaaccgcgtggcgtacaacgtcggcgggcagatggccaccaacaaccagagctccaccactgcccccgcgaccggcacgtacaacctccaggaaatcgtgcccggcagcgtgtggatggagagggacgtgtacctccaaggacccatctgggccaagatcccagagacgggggcgcactttcacccctctccggccatgggcggattcggactcaaacacccaccgcccatgatgctcatcaagaacacgcctgtgcccggaaatatcaccagcttctcggacgtgcccgtcagcagcttcatcacccagtacagcaccgggcaggtcaccgtggagatggagtgggagctcaagaaggaaaactccaagaggtggaacccagagatccagtacacaaacaactacaacgacccccagtttgtggactttgccccggacagcaccggggaatacagaaccaccagacctatcggaacccgataccttacccgacccctttaacccattcatgtcgcataccctcaataaa

SEQ ID NO: 1187 - protein, 724 aa, Artificial Sequence
  source: /note="Description of Artificial Sequence: Synthetic polypeptide"
MSFVDHPPDWLEEVGEGLREFLGLEAGPPKPKPNQQHQDQARGLVLPGYNYLGPGNGLDRGEPVNRADEVAREHDISYNEQLEAGDNPYLKYNHADAEFQEKLADDTSFGGNLGKAVFQAKKRVLEPFGLVEEGAKTAPTGKRIDDHFPKRKKARTEEDSKPSTSSDAEAGPSGSQQLQIPAQPASSLGADTMSAGGGGPLGDNNQGADGVGNASGDWHCDSTWMGDRVVTKSTRTWVLPSYNNHQYREIKSGSVDGSNANAYFGYSTPWGYFDFNRFHSHWSPRDWQRLINNYWGFRPRSLRVKIFNIQVKEVTVQDSTTTIANNLTSTVQVFTDDDYQLPYVVGNGTEGCLPAFPPQVFTLPQYGYATLNRDNTENPTERSSFFCLEYFPSKMLRTGNNFEFTYNFEEVPFHSSFAPSQNLFKLANPLVDQYLYRFVSTNNTGGVQFNKNLAGRYANTYKNWFPGPMGRTQGWNLGSGVNRASVSAFATTNRMELEGASYQVPPQPNGMTNNLQGSNTYALENTMIFNSQGANPGTTATYLEGNMLITSESETQPVNRVAYNVGGQMATNNQSSTTAPATGTYNLQEIVPGSVWMERDVYLQGPIWAKIPETGAHFHPSPAMGGFGLKHPPPMMLIKNTPVPGNITSFSDVPVSSFITQYSTGQVTVEMEWELKKENSKRWNPEIQYTNNYNDPQFVDFAPDSTGEYRTTRPIGTRYLTRPL

SEQ ID NO: 1188 - DNA, 2194 bp, Artificial Sequence
  source: /note="Description of Artificial Sequence: Synthetic polynucleotide"
atgtcttttgttgatcaccctccagattggttggaagaagttggtgaaggtcttcgcgagtttttgggccttgaagcgggcccaccgaaaccaaaacccaatcagcagcatcaagatcaagcccgtggtcttgtgctgcctggttataactatctcggacccggaaacggtctcgatcgaggagagcctgtcaacagggcagacgaggtcgcgcgagagcacgacatctcgtacaacgagcagcttgaggcgggagacaacccctacctcaagtacaaccacgcggacgccgagtttcaggagaagctcgccgacgacacatccttcgggggaaacctcggaaaggcagtctttcaggccaagaaaagggttctcgaaccttttggcctggttgaagagggtgctaagacggcccctaccggaaagcggatagacgaccactttccaaaaagaaagaaggctcggaccgaagaggactccaagccttccacctcgtcagacgccgaagctggacccagcggatcccagcagctgcaaatcccagcccaaccagcctcaagtttgggagctgatacaatgtctgcgggaggtggcggcccattgggcgacaataaccaaggtgccgatggagtgggcaatgcctcgggagattggcattgcgattccacgtggatgggggacagagtcgtcaccaagtccacccgaacctgggtgctgcccagctacaacaaccaccagtaccgagagatcaaaagcggctccgtcgacggaagcaacgccaacgcctactttggatacagcaccccctgggggtactttgactttaaccgcttccacagccactggagcccccgagactggcaaagactcatcaacaactactggggcttcagaccccggtccctcagagtcaaaatcttcaacattcaagtcaaagaggtcacggtgcaggactccaccaccaccatcgccaacaacctcacctccaccgtccaagtgtttacggacgacgactaccagctgccctacgtcgtcggcaacgggaccgagggatgcctgccggccttccctccgcaggtctttacgctgccgcagtacggttacgcgacgctgaaccgcgacaacacagaaaatcccaccgagaggagcagcttcttctgcctagagtactttcccagcaagatgctgagaacgggcaacaactttgagtttacctacaactttgaggaggtgcccttccactccagcttcgctcccagtcagaacctgttcaagctggccaacccgctggtggaccagtacttgtaccgcttcgtgagcacaaataacactggcggagtccagttcaacaagaacctggccgggagatacgccaacacctacaaaaactggttcccggggcccatgggccgaacccagggctggaacctgggctccggggtcaaccgcgccagtgtcagcgccttcgccacgaccaataggatggagctcgagggcgcgagttaccaggtgcccccgcagccgaacggcatgaccaacaacctccagggcagcaacacctatgccctggagaacactatgatcttcgggaagcaaggctcagagaaaacaaatgtggacattgaaaaggtcatgatcaccagcgagagcgagacgcagccggtgaaccgcgtggcgtacaacgtcggcgggcagatggccaccaacaaccagagctccaccactgcccccgcgaccggcacgtacaacctccaggaaatcgtgcccggcagcgtgtggatggagagggacgtgtacctccaaggacccatctgggccaagatcccagagacgggggcgcactttcacccctctccggccatgggcggattcggactcaaacacccaccgcccatgatgctcatcaagaacacgcctgtgcccggaaatatcaccagcttctcggacgtgcccgtcagcagcttcatcacccagtacagcaccgggcaggtcaccgtggagatggagtgggagctcaagaaggaaaactccaagaggtggaacccagagatccagtacacaaacaactacaacgacccccagtttgtggactttgccccggacagcaccggggaatacagaaccaccagacctatcggaacccgataccttacccgacccctttaacccattcatgtcgcataccctcaataaa

SEQ ID NO: 1189 - protein, 721 aa, Artificial Sequence
  source: /note="Description of Artificial Sequence: Synthetic polypeptide"
MSFVDHPPDWLEEVGEGLREFLGLEAGPPKPKPNQQHQDQARGLVLPGYNYLGPGNGLDRGEPVNRADEVAREHDISYNEQLEAGDNPYLKYNHADAEFQEKLADDTSFGGNLGKAVFQAKKRVLEPFGLVEEGAKTAPTGKRIDDHFPKRKKARTEEDSKPSTSSDAEAGPSGSQQLQIPAQPASSLGADTMSAGGGGPLGDNNQGADGVGNASGDWHCDSTWMGDRVVTKSTRTWVLPSYNNHQYREIKSGSVDGSNANAYFGYSTPWGYFDFNRFHSHWSPRDWQRLINNYWGFRPRSLRVKIFNIQVKEVTVQDSTTTIANNLTSTVQVFTDDDYQLPYVVGNGTEGCLPAFPPQVFTLPQYGYATLNRDNTENPTERSSFFCLEYFPSKMLRTGNNFEFTYNFEEVPFHSSFAPSQNLFKLANPLVDQYLYRFVSTNNTGGVQFNKNLAGRYANTYKNWFPGPMGRTQGWNLGSGVNRASVSAFATTNRMELEGASYQVPPQPNGMTNNLQGSNTYALENTMIFGKQGSEKTNVDIEKVMITSESETQPVNRVAYNVGGQMATNNQSSTTAPATGTYNLQEIVPGSVWMERDVYLQGPIWAKIPETGAHFHPSPAMGGFGLKHPPPMMLIKNTPVPGNITSFSDVPVSSFITQYSTGQVTVEMEWELKKENSKRWNPEIQYTNNYNDPQFVDFAPDSTGEYRTTRPIGTRYLTRPL

SEQ ID NO: 1190 - protein, 519 aa, Artificial Sequence
  source: /note="Description of Artificial Sequence: Synthetic polypeptide"
DGVGSSSGNWHCDSTWLGDRVITTSTRTWALPTYNNHLYKQISNGTSGGATNDNTYFGYSTPWGYFDFNRFHCHFSPRDWQRLINNNWGFRPKRLSFKLFNIQVKEVTQNEGTKTIANNLTSTIQVFTDSEYQLPYVLGSAHQGCLPPFPADVFMIPQYGYLTLNNGSQAVGRSSFYCLEYFPSQMLRTGNNFQFTYTFEDVPFHSSYAHSQSLDRLMNPLIDQYLYYLSRTQTTGGTANTQTLGFSQGGPNTMANQAKNWLPGPCYRQQRVSTTTGQNNNSNFAWTAGTKYHLNGRNSLANPGIAMATHKDDEERFFPSNGILIFGKQNAARDNADYSDVMLTSEEEIKTTNPVATEEYGIVADNLQQQNTAPQIGTVNSQGALPGMVWQNRDVYLQGPIWAKIPHTDGNFHPSPLMGGFGLKHPPPQILIKNTPVPADPPTTFNQSKLNSFITQYSTGQVSVEIEWELQKENSKRWNPEIQYTSNYYKSTSVDFAVNTEGVYSEPRPIGTRYLTRNL

SEQ ID NO: 1191 - protein, 738 aa, Artificial Sequence
  source: /note="Description of Artificial Sequence: Synthetic polypeptide"
MAADGYLPDWLEDNLSEGIREWWALQPGAPKPKANQQHQDNARGLVLPGYKYLGPGNGLDKGEPVNAADAAALEHDKAYDQQLKAGDNPYLKYNHADAEFQERLKEDTSFGGNLGRAVFQAKKRLLEPLGLVEEAAKTAPGKKRPVEPSPQRSPDSSTGIGKKGQQPARKRLNFGQTGDSESVPDPQPLGEPPAAPSGVGPNTMAAGGGAPMADNNEGADGVGSSSGNWHCDSTWLGDRVITTSTRTWALPTYNNHLYKQISNGTSGGATNDNTYFGYSTPWGYFDFNRFHCHFSPRDWQRLINNNWGFRPKRLSFKLFNIQVKEVTQNEGTKTIANNLTSTIQVFTDSEYQLPYVLGSAHQGCLPPFPADVFMIPQYGYLTLNNGSQAVGRSSFYCLEYFPSQMLRTGNNFQFTYTFEDVPFHSSYAHSQSLDRLMNPLIDQYLYYLSRTQTTGGTANTQTLGFSQGGPNTMANQAKNWLPGPCYRQQRVSTTTGQNNNSNFAWTAGTKYHLNGRNSLANPGIAMATHKDDEERFFPSNGILIFGKQNAARDNADYSDVMLTSEEEIKTTNPVATEEYGIVADNLQQQNTAPQIGTVNSQGALPGMVWQNRDVYLQGPIWAKIPHTDGNFHPSPLMGGFGLKHPPPQILIKNTPVPADPPTTFNQSKLNSFITQYSTGQVSVEIEWELQKENSKRWNPEIQYTSNYYKSTSVDFAVNTEGVYSEPRPIGTRYLTRNL

SEQ ID NO: 1192 - protein, 725 aa, Artificial Sequence
  source: /note="Description of Artificial Sequence: Synthetic polypeptide"
MAADGYLPDWLEDNLSEGIREWWALQPGAPKPKANQQHQDNARGLVLPGYKYLGPGNGLDKGEPVNAADAAALEHDKAYDQQLKAGDNPYLKYNHADAEFQERLKEDTSFGGNLGRAVFQAKKRLLEPLGLVEEAAKTAPTGKRIDDHFPKRKKARTEEDSKPSTSSDAEAGPSGSQQLQIPAQPASSLGADTMSAGGGGPLGDNNQGADGVGNASGDWHCDSTWMGDRVVTKSTRTWVLPSYNNHQYREIKSGSVDGSNANAYFGYSTPWGYFDFNRFHSHWSPRDWQRLINNYWGFRPRSLRVKIFNIQVKEVTVQDSTTTIANNLTSTVQVFTDDDYQLPYVVGNGTEGCLPAFPPQVFTLPQYGYATLNRDNTENPTERSSFFCLEYFPSKMLRTGNNFEFTYNFEEVPFHSSFAPSQNLFKLANPLVDQYLYRFVSTNNTGGVQFNKNLAGRYANTYKNWFPGPMGRTQGWNLGSGVNRASVSAFATTNRMELEGASYQVPPQPNGMTNNLQGSNTYALENTMIFNSQPANPGTTATYLEGNMLITSESETQPVNRVAYNVGGQMATNNQSSTTAPATGTYNLQEIVPGSVWMERDVYLQGPIWAKIPETGAHFHPSPAMGGFGLKHPPPMMLIKNTPVPGNITSFSDVPVSSFITQYSTGQVTVEMEWELKKENSKRWNPEIQYTNNYNDPQFVDFAPDSTGEYRTTRPIGTRYLTRPL

SEQ ID NO: 1193 - protein, 736 aa, Artificial Sequence
  source: /note="Description of Artificial Sequence: Synthetic polypeptide"
MAADGYLPDWLEDNLSEGIREWWALKPGAPKPKANQQKQDDGRGLVLPGYKYLGPFNGLDKGEPVNAADAAALEHDKAYDQQLQAGDNPYLRYNHADAEFQERLQEDTSFGGNLGRAVFQAKKRVLEPLGLVEEGAKTAPGKKRPVDQSPQEPDSSSGVGKSGKQPARKRLNFGQTGDSESVPDPQPLGEPPAAPTSLGSNTMASGGGAPMADNNEGADGVGNSSGNWHCDSQWLGDRVITTSTRTWALPTYNNHLYKQISSQSGASNDNHYFGYSTPWGYFDFNRFHCHFSPRDWQRLINNNWGFRPKKLSFKLFNIQVKEVTQNDGTTTIANNLTSTVQVFTDSEYQLPYVLGSAHQGCLPPFPADVFMVPQYGYLTLNNGSQAVGRSSFYCLEYFPSQMLRTGNNFQFSYTFEDVPFHSSYAHSQSLDRLMNPLIDQYLYYLNRTQGTTSGTTNQSRLLFSQAGPQSMSLQARNWLPGPCYRQQRLSKTANDNNNSNFPWTAASKYHLNGRDSLVNPGPAMASHKDDEEKFFPMHGNLIFGKEGTTASNAELDNVMITDEEEIRTTNPVATEQYGTVANNLQSSNTAPTTRTVNDQGALPGMVWQDRDVYLQGPIWAKIPHTDGHFHPSPLMGGFGLKHPPPQIMIKNTPVPANPPTTFSPAKFASFITQYSTGQVSVEIEWELQKENSKRWNPEIQYTSNYNKSVNVDFTVDTNGVYSEPRPIGTRYLTRNL

SEQ ID NO: 1194 - protein, 735 aa, Artificial Sequence
  source: /note="Description of Artificial Sequence: Synthetic polypeptide"
MSFVDHPPDWLEEVGEGLREFLGLEAGPPKPKPNQQHQDQARGLVLPGYNYLGPGNGLDRGEPVNRADEVAREHDISYNEQLEAGDNPYLKYNHADAEFQEKLADDTSFGGNLGKAVFQAKKRVLEPFGLVEEGAKTAPGKKRPVDQSPQEPDSSSGVGKSGKQPARKRLNFGQTGDSESVPDPQPLGEPPAAPTSLGSNTMASGGGAPMADNNEGADGVGNSSGNWHCDSQWLGDRVITTSTRTWALPTYNNHLYKQISSQSGASNDNHYFGYSTPWGYFDFNRFHCHFSPRDWQRLINNNWGFRPKKLSFKLFNIQVKEVTQNDGTTTIANNLTSTVQVFTDSEYQLPYVLGSAHQGCLPPFPADVFMVPQYGYLTLNNGSQAVGRSSFYCLEYFPSQMLRTGNNFQFSYTFEDVPFHSSYAHSQSLDRLMNPLIDQYLYYLNRTQGTTSGTTNQSRLLFSQAGPQSMSLQARNWLPGPCYRQQRLSKTANDNNNSNFPWTAASKYHLNGRDSLVNPGPAMASHKDDEEKFFPMHGNLIFGKEGTTASNAELDNVMITDEEEIRTTNPVATEQYGTVANNLQSSNTAPTTRTVNDQGALPGMVWQDRDVYLQGPIWAKIPHTDGHFHPSPLMGGFGLKHPPPQIMIKNTPVPANPPTTFSPAKFASFITQYSTGQVSVEIEWELQKENSKRWNPEIQYTSNYNKSVNVDFTVDTNGVYSEPRPIGTRYLTRPL

SEQ ID NO: 1195 - protein, 736 aa, Artificial Sequence
  source: /note="Description of Artificial Sequence: Synthetic polypeptide"
MAADGYLPDWLEDNLSEGIREWWALKPGAPKPKANQQKQDDGRGLVLPGYKYLGPFNGLDKGEPVNAADAAALEHDKAYDQQLQAGDNPYLRYNHADAEFQERLQEDTSFGGNLGRAVFQAKKRVLEPLGLVEEGAKTAPGKKRPVEPSPQRSPDSSTGIGKKGQQPARKRLNFGQTGDSESVPDPQPLGEPPAAPSGVGPNTMAAGGGAPMADNNEGADGVGSSSGNWHCDSTWLGDRVITTSTRTWALPTYNNHLYKQISSQSGASNDNHYFGYSTPWGYFDFNRFHCHFSPRDWQRLINNNWGFRPKRLSFKLFNIQVKEVTQNEGTKTIANNLTSTIQVFTDSEYQLPYVLGSAHQGCLPPFPADVFMIPQYGYLTLNNGSQAVGRSSFYCLEYFPSQMLRTGNNFQFTYTFEDVPFHSSYAHSQSLDRLMNPLIDQYLYYLSRTQTTGGTANTQTLGFSQGGPNTMANQAKNWLPGPCYRQQRVSTTTGQNNNSNFAWTAGTKYHLNGRNSLANPGIAMATHKDDEERFFPSNGILIFGKQGTTASNAELDNVMITDEEEIKTTNPVATEEYGIVADNLQQQNTAPQIGTVNSQGALPGMVWQNRDVYLQGPIWAKIPHTDGNFHPSPLMGGFGLKHPPPQILIKNTPVPADPPTTFNQSKLNSFITQYSTGQVSVEIEWELQKENSKRWNPEIQYTSNYNKSVNVDFTVDTNGVYSEPRPIGTRYLTRNL

SEQ ID NO: 1196 - protein, 736 aa, Artificial Sequence
  source: /note="Description of Artificial Sequence: Synthetic polypeptide"
MAADGYLPDWLEDNLSEGIREWWALKPGAPKPKANQQKQDDGRGLVLPGYKYLGPFNGLDKGEPVNAADAAALEHDKAYDQQLQAGDNPYLRYNHADAEFQERLQEDTSFGGNLGRAVFQAKKRVLEPLGLVEEGAKTAPGKKRPVEPSPQRSPDSSTGIGKKGQQPARKRLNFGQTGDSESVPDPQPLGEPPAAPSGVGPNTMAAGGGAPMADNNEGADGVGSSSGNWHCDSTWLGDRVITTSTRTWALPTYNNHLYKQISSQSGASNDNHYFGYSTPWGYFDFNRFHCHFSPRDWQRLINNNWGFRPKRLSFKLFNIQVKEVTQNEGTKTIANNLTSTIQVFTDSEYQLPYVLGSAHQGCLPPFPADVFMIPQYGYLTLNNGSQAVGRSSFYCLEYFPSQMLRTGNNFQFTYTFEDVPFHSSYAHSQSLDRLMNPLIDQYLYYLSRTQTTGGTANTQTLGFSQGGPNTMANQAKNWLPGPCYRQQRVSTTTGQNNNSNFAWTAGTKYHLNGRNSLANPGIAMATHKDDEERFFPSNGILIFGKQNAARDNADYSDVMLTSEEEIKTTNPVATEEYGIVADNLQQQNTAPQIGTVNSQGALPGMVWQNRDVYLQGPIWAKIPHTDGNFHPSPLMGGFGLKHPPPQILIKNTPVPADPPTTFNQSKLNSFITQYSTGQVSVEIEWELQKENSKRWNPEIQYTSNYYKSTSVDFAVNTEGVYSEPRPIGTRYLTRNL

SEQ ID NO: 1197 - protein, 736 aa, Artificial Sequence
  source: /note="Description of Artificial Sequence: Synthetic polypeptide"
MAADGYLPDWLEDNLSEGIREWWDLKPGAPKPKANQQKQDDGRGLVLPGYKYLGPFNGLDKGEPVNAADAAALEHDKAYDQQLKAGDNPYLRYNHADAEFQERLQEDTSFGGNLGRAVFQAKKRVLEPLGLVEEGAKTAPGKKRPVEQSPQEPDSSSGIGKTGQQPAKKRLNFGQTGDTESVPDPQPLGEPPAAPSGLGPNTMASGGGAPMADNNEGADGVGNSSGNWHCDSTWLGDRVITTSTRTWALPTYNNHLYKQISNGTSGGSTNDNTYFGYSTPWGYFDFNRFHCHFSPRDWQRLINNNWGFRPKRLNFKLFNIQVKEVTTNEGTKTIANNLTSTVQVFTDSEYQLPYVLGSAHQGCLPPFPADVFMVPQYGYLTLNNGSQALGRSSFYCLEYFPSQMLRTGNNFQFSYTFEDVPFHSSYAHSQSLDRLMNPLIDQYLYYLVRTQTTGTGGTQTLAFSQAGPSSMASQARNWVPGPSYRQQRVSTTTNQNNNSNFAWTGAAKFKLNGRDSLMNPGVAMASHKDDEDRFFPSSGVLIFGKQGAGNDGVDYSQVLITDEEEIKATNPVATEEYGAVAINNQAANTQAQTGLVHNQGVIPGMVWQNRDVYLQGPIWAKIPHTDGNFHPSPLMGGFGLKHPPPQILIKNTPVPADPPLTFNQAKLNSFITQYSTGQVSVEIEWELQKENSKRWNPEIQYTSNYYKSTNVDFAVNTEGVYSEPRPIGTRYLTRNL

SEQ ID NO: 1198 - DNA, 3695 bp, Artificial Sequence
  source: /note="Description of Artificial Sequence: Synthetic polynucleotide"
ctctttgcgcttgcgttttcccttgtccagatagcccagtagctgacattcatccggggtcagcaccgtttctgcggactggctttctacgtgaaaaggatctaggtgaagatcctttttgataatctcatgcctgacatttatattccccagaacatcaggttaatggcgtttttgatgtcattttcgcggtggctgagatcagccacttcttccccgataacggagaccggcacactggccatatcggtggtcatcatgcgccagctttcatccccgatatgcaccaccgggtaaagttcacgggagactttatctgacagcagacgtgcactggccagggggatcaccatccgtcgccccggcgtgtcaataatatcactctgtacatccacaaacagacgataacggctctctcttttataggtgtaaaccttaaactgccgtacgtataggctgcgcaactgttgggaagggcgatcggtgcgggcctcttcgctattacgccagctggcgaaagggggatgtgctgcaaggcgattaagttgggtaacgccagggttttcccagtcacgacgttgtaaaacgacggccagtgaattgtaatacgactcactatagggcgaattgaatttagcggccgcgaattcgcccttatgatatctggtgggaggagggcaagatgacggccaaggtcgtggagtccgccaaggccattctcggcggcagcaaagtgcgcgtggaccaaaagtgcaagtcgtccgcccagatcgatcccactcccgtcattgtcacctccaacaccaacatgtgcgccgtgattgacgggaacagcaccaccttcgagcaccagcagccgttgcaggaccggatgttcaaatttgaacttacccgccgtctggagcatgactttggcaaggtgacaaagcaggaagtcaaagagttcttccgctgggcgcaggatcacgtgaccgaggtggcgcatgagttccacgtcagaaagggtggagccaacaagagacccgcccccgatgacgctgataaaagcgagcccaagcgggcctgcccctcagtcgcagatccatcgacgtcagacgcggaaggagctccggtggactttgccgacaggtaccaaaacaaatgttctcgtcacgcgggcatgcttcagatgctgtttccctgcaagacatgcgagagaatgaatcagaatttcaacatttgcttcacgcacgggaccagggactgttcggagtgcttccccggcgtgtcagaatctcaaccggtcgtcagaaaaaggacgtatcggaaactctgtgccattcatcatctgctggggagggctcccgagattgcttgctcggcctgcgatctggtcaacgtggacctggatgactgtgtctctgagcaataaatgacttaaaccaggtatggctgccgatggttatcttccagattggctcgaggacaacctctctgagggcattcgcgagtggtgggacttgaaacctggagccccgaaacccaaagccaaccagcaaaagcaggacgacggccggggtctggtgcttcctggctacaagtacctcggacccttcaacggactcgacaagggggagcccgtcaacgcggcggacgcagcggccctcgagcacgacaaggcctacgaccagcagctcaaagcgggtgacaatccgtacctgcggtataaccacgccgacgccgagtttcaggagcgtctgcaagaagatacgtcttttgggggcaacctcgggcgagcagtcttccaggccaagaagcgggttctcgaacctctcggtctggttgaggaaggcgctaagacggctcctggaaagaagagaccggtagagcagtcaccccaagaaccagactcctcatcgggcatcggcaagacaggccagcagcccgctaaaaagagactcaattttggtcagactggcgacacagagtcagtccccgacccacaacctctcggagaacctccagcagccccctcaggtctgggacctaatacaatggcttcaggcggtggcgctccaatggcagacaataacgaaggcgccgacggagtgggtaattcctcgggaaattggcattgcgattccacatggctgggggacagagtcatcaccaccagcacccgaacctgggccctgcccacctacaacaaccacctctacaagcaaatctccaacggcacctcgggaggaagcaccaacgacaacacctactttggctacagcaccccctgggggtattttgacttcaacagattccactgccacttttcaccacgtgactggcagcgactcatcaacaacaattggggattccggcccaagagactcaacttcaagctcttcaacatccaggtcaaggaagtcacgacgaacgaaggcaccaagaccatcgccaataatctcaccagcaccgtgcaggtctttacggactcggagtaccagctaccgtacgtgctaggatcagctcaccagggatgtctgcctccgttcccggcggacgtcttcatggttcctcagtacggttatctaactctgaacaatggcagccaggccctgggacgttcctccttctactgcctggagtatttcccatcgcagatgctgagaaccggcaacaactttcagttcagctacaccttcgaggacgtgcctttccacagcagctacgcgcacagccaaagcctggacaggctgatgaatcccctcatcgaccagtacctgtattacctggtcagaacgcagacaaccgggactggagggacgcagactctggcattcagccaagcaggccctagctcaatggccagccaggctagaaactgggtgcccggaccgagctaccggcagcagcgcgtctccacgacaaccaaccagaacaacaacagcaactttgcctggacgggagctgccaaatttaaactgaacggccgagactctctaatgaaccccggcgtggccatggcttcacacaaggatgacgaggaccgcttcttcccttctagcggggtcctgattttcggcaagcaaggagccgggaatgatggagtggattacagccaagtgctgattacagatgaggaagaaatcaaggctaccaaccccgtggcaacagaggaatatggagcagtggccatcaacaaccaggccgctaatacgcaggcgcagaccggactcgtgcacaaccagggggtgattcccggcatggtgtggcagaacagagacgtgtacctgcagggtcccatctgggccaaaattcctcacacggacggcaactttcacccgtctcccctgatgggcggctttggactgaagcacccgcctcctcaaattctcatcaagaacacaccggttccagcggacccgccgcttaccttcaaccaggccaagctgaactctttcatcacgcagtacagcaccggacaggtcagcgtggaaatcgagtgggagctgcagaaagaaaacagcaaacgctggaatccagagattcagtacacttccaactactacaaatctacaaatgtggactttgctgtcaacacggaaggagtgtatagcgagcctcgccccattggcacccgttacctcacccgcaacctgtaattgcctgttaatcaataaaccggttaattcgtttcagtaaggaagaattcgtttaaa

SEQ ID NO: 1199 - protein, 736 aa, Artificial Sequence; identical to SEQ ID NO: 518
  source: /note="Description of Artificial Sequence: Synthetic polypeptide"

SEQ ID NO: 1200 - protein, 736 aa, Artificial Sequence
  source: /note="Description of Artificial Sequence: Synthetic polypeptide"
MAADGYLPDWLEDNLSEGIREWWDLKPGAPKPKANQQKQDDGRGLVLPGYKYLGPFNGLDKGEPVNAADAAALEHDKAYDQQLKAGDNPYLRYNHADAEFQERLQEDTSFGGNLGRAVFQAKKRVLEPLGLVEEGAKTAPGKKRPVEQSPQEPDSSSGIGKTGQQPAKKRLNFGQTGDTESVPDPQPLGEPPAAPSGLGPNTMASGGGAPMADNNEGADGVGNSSGNWHCDSTWLGDRVITTSTRTWALPTYNNHLYKQISNGTSGGSTNDNTYFGYSTPWGYFDFNRFHCHFSPRDWQRLINNNWGFRPKRLNFKLFNIQVKEVTTNEGTKTIANNLTSTVQVFTDSEYQLPYVLGSAHQGCLPPFPADVFMVPQYGYLTLNNGSQALGRSSFYCLEYFPSQMLRTGNNFQFSYTFEDVPFHSSYAHSQSLDRLMNPLIDQYLYYLVRTQTTGTGGTQTLAFSQAGPSNMASQARNWVPGPSYRQQRVSTTTNQNNNSNFAWTGAAKFKLNGRDSLMNPGVAMASHKDDEDRFFPSSGVLIFGKQGAGNDGVDYSQVLITDEEEIKATNPVATEEYGAVAINNQAANTQAQTGLVHNQGVIPGMVWQNRDVYLQGPIWAKIPHTDGNFHPSPLMGGFGLKHPPPQILIKNTPVPADPPLTFNQAKLNSFITQYSTGQVSVEIEWELQKENSKRWNPEIQYTSNYYKSTNVDFAVNTEGVYSEPRPIGTRYLTRNL

SEQ ID NO: 1201 - protein, 738 aa, Artificial Sequence; identical to SEQ ID NO: 895
  source: /note="Description of Artificial Sequence: Synthetic polypeptide"

SEQ ID NO: 1202 - protein, 736 aa, Artificial Sequence
  source: /note="Description of Artificial Sequence: Synthetic polypeptide"
MAADGYLPDWLEDNLSEGIREWWALQPGAPKPKANQQHQDNARGLVLPGYKYLGPGNGLDKGEPVNAADAAALEHDKAYDQQLKAGDNPYLKYNHADAEFQERLKEDTSFGGNLGRAVFQAKKRILEPLGLVEEAAKTAPGKKRPVDQSPQEPDSSSGVGKSGKQPARKRLNFGQTGDSESVPDPQPLGEPPAAPTSLGSNTMASGGGAPMADNNEGADGVGNSSGNWHCDSQWLGDRVITTSTRTWALPTYNNHLYKQISSQSGASNDNHYFGYSTPWGYFDFNRFHCHFSPRDWQRLINNNWGFRPKKLSFKLFNIQVKEVTQNDGTTTIANNLTSTVQVFTDSEYQLPYVLGSAHQGCLPPFPADVFMVPQYGYLTLNNGSQAVGRSSFYCLEYFPSQMLRTGNNFQFSYTFEDVPFHSSYAHSQSLDRLMNPLIDQYLYYLNRTQGTTSGTTNQSRLLFSQAGPQSMSLQARNWLPGPCYRQQRLSKTANDNNNSNFPWTAASKYHLNGRDSLVNPGPAMASHKDDEEKFFPMHGNLIFGKEGTTASNAELDNVMITDEEEIRTTNPVATEQYGTVANNLQSSNTAPTTRTVNDQGALPGMVWQDRDVYLQGPIWAKIPHTDGHFHPSPLMGGFGLKHPPPQIMIKNTPVPANPPTTFSPAKFASFITQYSTGQVSVEIEWELQKENSKRWNPEIQYTSNYNKSVNVDFTVDTNGVYSEPRPIGTRYLTRPL

SEQ ID NO: 1203 - protein, 736 aa, Artificial Sequence
  source: /note="Description of Artificial Sequence: Synthetic polypeptide"
MAADGYLPDWLEDNLSEGIREWWALQPGAPKPKANQQHQDNARGLVLPGYKYLGPGNGLDKGEPVNAADAAALEHDKAYDQQLKAGDNPYLKYNHADAEFQERLKEDTSFGGNLGRAVFQAKKRLLEPLGLVEEAAKTAPGKKRPVDQSPQEPDSSSGVGKSGKQPARKRLNFGQTGDSESVPDPQPLGEPPAAPTSLGSNTMASGGGAPMADNNEGADGVGNSSGNWHCDSQWLGDRVITTSTRTWALPTYNNHLYKQISSQSGASNDNHYFGYSTPWGYFDFNRFHCHFSPRDWQRLINNNWGFRPKKLSFKLFNIQVKEVTQNDGTTTIANNLTSTVQVFTDSEYQLPYVLGSAHQGCLPPFPADVFMVPQYGYLTLNNGSQAVGRSSFYCLEYFPSQMLRTGNNFQFSYTFEDVPFHSSYAHSQSLDRLMNPLIDQYLYYLNRTQGTTSGTTNQSRLLFSQAGPQSMSLQARNWLPGPCYRQQRLSKVANDNNNSNFPWTAASKYHLNGRDSLVNPGPAMASHKDDEEKFFPMHGNLIFGKEGTTASNAELDNVMITDEEEIRTTNPVATEQYGTVANNLQSSNTAPTTRTVNDQGALPGMVWQDRDVYLQGPIWAKIPHTDGHFHPSPLMGGFGLKHPPPQIMIKNTPVPANPPTTFVPAKFASFITQYSTGQVSVEIEWELQKENSKRWNPEIQYTSNYNKSVNVDFTVDTNGVYSEPRPIGTRYLTRPL

SEQ ID NO: 1204 - protein, 736 aa, Artificial Sequence; identical to SEQ ID NO: 912
  source: /note="Description of Artificial Sequence: Synthetic polypeptide"
  VARIANT (168)..(168): /replace="Arg"
  VARIANT (204)..(204): /replace="Ser"
  VARIANT (266)..(266): /replace="Gly"
  VARIANT (311)..(311): /replace="Lys"
  VARIANT (411)..(411): /replace="Gln"
  VARIANT (460)..(460): /replace="Glu"
  VARIANT (493)..(493): /replace="Thr"
  VARIANT (562)..(562): /replace="Asn"
  VARIANT (576)..(576): /replace="Glu"
  VARIANT (587)..(587): /replace="Ala"
  VARIANT (609)..(609): /replace="Asp
  SITE (1)..(736): /note="Variant residues given in the sequence have no preference with respect to those in the annotations for variant positions"

SEQ ID NO: 1205 - DNA, 2208 bp, Artificial Sequence; identical to SEQ ID NO: 913
  source: /note="Description of Artificial Sequence: Synthetic polynucleotide"
  variation (502)..(504): /replace="aaa"
  variation (610)..(612): /replace="agc"
  variation (796)..(798): /replace="ggc"
  variation (931)..(933): /replace="aag"
  variation (1231)..(1233): /replace="cag"
  variation (1378)..(1380): /replace="gag"
  variation (1477)..(1479): /replace="acc"
  variation (1684)..(1686): /replace="aac"
  variation (1726)..(1728): /replace="gag"
  variation (1759)..(1761): /replace="gcc"
  variation (1825)..(1827): /replace="gac"
  misc_feature (1)..(2208): /note="Variant residues given in the sequence have no preference with respect to those in the annotations for variant positions"

SEQ ID NO: 1206 - protein, 737 aa, Artificial Sequence
  source: /note="Description of Artificial Sequence: Synthetic polypeptide"
  VARIANT (157)..(157): /replace="Ser"
  VARIANT (168)..(168): /replace="Arg"
  VARIANT (262)..(262): /replace="Ser"
  VARIANT (263)..(263): /replace="His"
  VARIANT (312)..(312): /replace="Lys"
  VARIANT (412)..(412): /replace="Gln"
  VARIANT (460)..(460): /replace="Gln"
  VARIANT (461)..(461): /replace="Glu"
  VARIANT (552)..(552): /replace="Ser"
  VARIANT (556)..(556): /replace="Tyr"
  VARIANT (557)..(557): /replace="Ser"
  VARIANT (563)..(563): /replace="Asn"
  VARIANT (580)..(580): /replace="Ile"
  VARIANT (588)..(588): /replace="Ser"
  VARIANT (664)..(664): /replace="Thr
  SITE (1)..(737): /note="Variant residues given in the sequence have no preference with respect to those in the annotations for variant positions"
MAADGYLPDWLEDNLSEGIREWWDLKPGAPKPKANQQKQDDGRGLVLPGYKYLGPFNGLDKGEPVNAADAAALEHDKAYDQQLKAGDNPYLRYNHADAEFQERLQEDTSFGGNLGRAVFQAKKRVLEPLGLVEEGAKTAPGKKRPVEQSPQEPDSSTGIGKKGQQPAKKRLNFGQTGDSESVPDPQPLGEPPAAPSGVGSNTMAAGGGAPMADNNEGADGVGNASGNWHCDSTWLGDRVITTSTRTWALPTYNNHLYKQISNSQSGGSTNDNTYFGYSTPWGYFDFNRFHCHFSPRDWQRLINNNWGFRPKRLNFKLFNIQVKEVTTNDGTTTIANNLTSTVQVFTDSEYQLPYVLGSAHQGCLPPFPADVFMIPQYGYLTLNNGSQAVGRSSFYCLEYFPSQMLRTGNNFEFSYTFEDVPFHSSYAHSQSLDRLMNPLIDQYLYYLSRTQTTGGTAGNRTLQFSQAGPSSMANQAKNWLPGPCYRQQRVSKTTNQNNNSNFAWTGATKYHLNGRDSLVNPGVAMATHKDDEDRFFPSSGVLIFGKQGAGNDNVDLDNVMITSEEEIKTTNPVATEEYGVVATNLQSNNTAPQTGTVNSQGALPGMVWQNRDVYLQGPIWAKIPHTDGNFHPSPLMGGFGLKHPPPQILIKNTPVPANPPTTFSPAKFASFITQYSTGQVSVEIEWELQKENSKRWNPEIQYTSNYNKSTNVDFAVDTEGVYSEPRPIGTRYLTRNL

SEQ ID NO: 1207 - DNA, 2211 bp, Artificial Sequence; identical to SEQ ID NO: 915
  source: /note="Description of Artificial Sequence: Synthetic polynucleotide"
  variation (469)..(471): /replace="agc"
  variation (502)..(504): /replace="aag"
  variation (784)..(786): /replace="agt"
  variation (787)..(789): /replace="cac"
  variation (934)..(936): /replace="aag"
  variation (1234)..(1236): /replace="cag"
  variation (1378)..(1380): /replace="cag"
  variation (1381)..(1383): /replace="gag"
  variation (1654)..(1656): /replace="agc"
  variation (1666)..(1668): /replace="tac"
  variation (1669)..(1671): /replace="agc"
  variation (1687)..(1689): /replace="aac"
  variation (1738)..(1740): /replace="atc"
  variation (1762)..(1764): /replace="agc"
  variation (1990)..(1992): /replace="acc"
  misc_feature (1)..(2211): /note="Variant residues given in the sequence have no preference with respect to those in the annotations for variant positions"

SEQ ID NO: 1208 - protein, 738 aa, Artificial Sequence; identical to SEQ ID NO: 916
  source: /note="Description of Artificial Sequence: Synthetic polypeptide"
  VARIANT (158)..(158): /replace="Ser"
  VARIANT (169)..(169): /replace="Arg"
  VARIANT (564)..(564): /replace="Asn
  SITE (1)..(738): /note="Variant residues given in the sequence have no preference with respect to those in the annotations for variant positions"

SEQ ID NO: 1209 - DNA, 2214 bp, Artificial Sequence; identical to SEQ ID NO: 917
  source: /note="Description of Artificial Sequence: Synthetic polynucleotide"
  variation (472)..(474): /replace="agc"
  variation (505)..(507): /replace="aga"
  variation (1690)..(1692): /replace="aac"
  misc_feature (1)..(2214): /note="Variant residues given in the sequence have no preference with respect to those in the annotations for variant positions"

SEQ ID NO: 1210 - protein, 738 aa, Artificial Sequence; identical to SEQ ID NO: 918
  source: /note="Description of Artificial Sequence: Synthetic polypeptide"
  VARIANT (158)..(158): /replace="Ser"
  VARIANT (169)..(169): /replace="Lys"
  VARIANT (315)..(315): /replace="Ser"
  VARIANT (413)..(413): /replace="Glu"
  VARIANT (472)..(472): /replace="Thr" or "Ser"
  VARIANT (534)..(534): /replace="Glu"
  VARIANT (542)..(542): /replace="Val"
  VARIANT (595)..(595): /replace="Val
  SITE (1)..(738): /note="Variant residues given in the sequence have no preference with respect to those in the annotations for variant positions"

SEQ ID NO: 1211 - DNA, 2214 bp, Artificial Sequence
  source: /note="Description of Artificial Sequence: Synthetic polynucleotide"
  variation (472)..(474): /replace="agc"
  variation (505)..(507): /replace="aag"
  variation (943)..(945): /replace="agc"
  variation (1237)..(1239): /replace="gaa"
  variation (1414)..(1416): /replace="acc" or "agc"
  variation (1600)..(1602): /replace="gag"
  variation (1624)..(1626): /replace="gtc"
  variation (1783)..(1785): /replace="gta"
  misc_feature (1)..(2214): /note="Variant residues given in the sequence have no preference with respect to those in the annotations for variant positions"
atggctgccgatggttatcttccagattggctcgaggacaacctctctgagggcattcgcgagtggtgggacctgaaacctggagccccgaaacccaaagccaaccagcaaaagcaggacgacggccggggtctggtgcttcctggctacaagtacctcggacccttcaacggactcgacaagggggagcccgtcaacgcggcggacgcagcggccctcgagcacgacaaggcctacgaccagcagctcaaagcgggtgacaatccgtacctgcggtataatcacgccgacgccgagtttcaggagcgtctgcaagaagatacgtcttttgggggcaacctcgggcgagcagtcttccaggccaagaagcgggttctcgaacctctcggtctggttgaggaaggcgctaagacggctcctggaaagaagagaccggtagagcagtcaccacagcgtgagcccgactcctccacgggcatcggcaagaaaggccagcagcccgccagaaagagactcaatttcggtcagactggcgactcagagtcagtccccgaccctcaacctctcggagaacctccagcagcgccctctggtgtgggatctaatacaatggctgcaggcggtggcgcaccaatggcagacaataacgaaggtgccgacggagtgggtagttcctcgggaaattggcattgcgattccacatggctgggcgacagagtcatcaccaccagcacccgaacctgggccctgcccacctacaacaaccacctctacaagcaaatctccaacgggacctcgggaggcagcaccaacgacaacacctactttggctacagcaccccctgggggtattttgactttaacagattccactgccacttctcaccacgtgactggcagcgactcatcaacaacaactggggattccggcccaagagactcaacttcaagctcttcaacatccaggtcaaagaggtcacgcagaatgaaggcaccaagaccatcgccaataacctcaccagcaccatccaggtgtttacggactcggaataccagctgccgtacgtcctcggctctgcccaccagggctgcctgcctccgttcccggcggacgtcttcatgattcctcagtacggctacctgactctcaacaacggtagtcaggccgtgggacgttcctccttctactgcctggagtacttcccctctcagatgctgagaacgggcaacaactttcaattcagctacactttcgaggacgtgcctttccacagcagctacgcgcacagccagagtttggacaggctgatgaatcctctcatcgaccagtacctgtactacctgtcaagaacccagactacgggaggcacagcgggaacccagacgttgcagttttctcaggccgggcctagcaacatggcgaatcaggccaaaaactggctgcctggaccctgctacagacagcagcgcgtctccacgacaacgtcgcaaaacaacaacagcaactttgcctggactggtgccaccaagtatcatctgaacggcagagactctctggtgaatccgggcgtcgccatggcaacccacaaggacgacgaggaccgcttcttcccatccagcggcatcctcatatttggcaagcagggagctggaaaagacaacgtggactatagcaacgtgatgctaaccagcgaggaagaaatcaagaccaccaaccccgtggccacagaagagtatggcgtggtggctgataacctacagcagcaaaacaccgctcctcaaatagggaccgtcaacagccagggagccttacctggcatggtctggcagaaccgggacgtgtacctgcagggtcctatttgggccaagattcctcacacagatggcaactttcacccgtctcctttaatgggcggctttggacttaaacatccgcctcctcagatcctcatcaaaaacactcctgttcctgcggatcctccaacaacgttcaaccaggccaagctgaattctttcatcacgcagtacagcaccggacaagtcagcgtggagatcgagtgggagctgcagaaggagaacagcaagcgctggaacccagagattcagtatacttccaactactacaaatctacaaatgtggactttgctgttaatactgagggtgtttactctgagcctcgccccattggcactcgttacctcacccgtaatctg

SEQ ID NO: 1212 - protein, 738 aa, Artificial Sequence; identical to SEQ ID NO: 920
  source: /note="Description of Artificial Sequence: Synthetic polypeptide"
  VARIANT (169)..(169): /replace="Lys"
  VARIANT (315)..(315): /replace="Ser"
  VARIANT (534)..(534): /replace="Glu"
  VARIANT (542)..(542): /replace="Val
  SITE (1)..(738): /note="Variant residues given in the sequence have no preference with respect to those in the annotations for variant positions"

SEQ ID NO: 1213 - DNA, 2214 bp, Artificial Sequence; identical to SEQ ID NO: 921
  source: /note="Description of Artificial Sequence: Synthetic polynucleotide"
  variation (505)..(507): /replace="aaa"
  variation (943)..(945): /replace="agc"
  variation (1600)..(1602): /replace="gag"
  variation (1624)..(1626): /replace="gtc"
  misc_feature (1)..(2214): /note="Variant residues given in the sequence have no preference with respect to those in the annotations for variant positions"

SEQ ID NO: 1214 - protein, 738 aa, Artificial Sequence; identical to SEQ ID NO: 922
  source: /note="Description of Artificial Sequence: Synthetic polypeptide"
  VARIANT (471)..(471): /replace="Asn
  SITE (1)..(738): /note="Variant residues given in the sequence have no preference with respect to those in the annotations for variant positions"

SEQ ID NO: 1215 - DNA, 2214 bp, Artificial Sequence; identical to SEQ ID NO: 923
  source: /note="Description of Artificial Sequence: Synthetic polynucleotide"
  variation (1411)..(1413): /replace="aat"
  misc_feature (1)..(2214): /note="Variant residues given in the sequence have no preference with respect to those in the annotations for variant positions"

SEQ ID NO: 1216 - protein, 737 aa, Artificial Sequence; identical to SEQ ID NO: 924
  source: /note="Description of Artificial Sequence: Synthetic polypeptide"
  VARIANT (148)..(148): /replace="Gln"
  VARIANT (169)..(169): /replace="Arg"
  VARIANT (314)..(314): /replace="Asn"
  VARIANT (466)..(466): /replace="His"
  VARIANT (563)..(563): /replace="Ser"
  VARIANT (580)..(580): /replace="Ile"
  VARIANT (588)..(588): /replace="Ser
  SITE (1)..(737): /note="Variant residues given in the sequence have no preference with respect to those in the annotations for variant positions"

SEQ ID NO: 1217 - DNA, 2211 bp, Artificial Sequence; identical to SEQ ID NO: 925
  source: /note="Description of Artificial Sequence: Synthetic polynucleotide"
  variation (442)..(444): /replace="cag"
  variation (505)..(507): /replace="aga"
  variation (940)..(942): /replace="aac"
  variation (1396)..(1398): /replace="cac"
  variation (1687)..(1689): /replace="agt"
  variation (1738)..(1740): /replace="ata"
  variation (1762)..(1764): /replace="tct"
  misc_feature (1)..(2211): /note="Variant residues given in the sequence have no preference with respect to those in the annotations for variant positions"

SEQ ID NO: 1218 - protein, 735 aa, Artificial Sequence; identical to SEQ ID NO: 926
  source: /note="Description of Artificial Sequence: Synthetic polypeptide"
  VARIANT (162)..(162): /replace="Thr"
  VARIANT (168)..(168): /replace="Arg"
  VARIANT (224)..(224): /replace="Ser"
  VARIANT (310)..(310): /replace="Lys"
  VARIANT (410)..(410): /replace="Gln"
  VARIANT (446)..(446): /replace="Asn"
  VARIANT (461)..(461): /replace="Leu"
  VARIANT (471)..(471): /replace="Ser"
  VARIANT (708)..(708): /replace="Thr
  SITE (1)..(735): /note="Variant residues given in the sequence have no preference with respect to those in the annotations for variant positions"

SEQ ID NO: 1219 - DNA, 2205 bp, Artificial Sequence; identical to SEQ ID NO: 927
  source: /note="Description of Artificial Sequence: Synthetic polynucleotide"
  variation (484)..(486): /replace="aca"
  variation (502)..(504): /replace="aga"
  variation (670)..(672): /replace="tcc"
  variation (928)..(930): /replace="aaa"
  variation (1228)..(1230): /replace="cag"
  variation (1336)..(1338): /replace="aac"
  variation (1381)..(1383): /replace="ctg"
  variation (1411)..(1413): /replace="tct"
  variation (2122)..(2124): /replace="acc"
  misc_feature (1)..(2205): /note="Variant residues given in the sequence have no preference with respect to those in the annotations for variant positions"

SEQ ID NO: 1220 - protein, 735 aa, Artificial Sequence; identical to SEQ ID NO: 928
  source: /note="Description of Artificial Sequence: Synthetic polypeptide"
  VARIANT (42)..(42): /replace="Ser"
  VARIANT (168)..(168): /replace="Lys"
  VARIANT (310)..(310): /replace="Arg"
  VARIANT (410)..(410): /replace="Gln"
  VARIANT (446)..(446): /replace="Arg"
  VARIANT (461)..(461): /replace="Leu"
  VARIANT (471)..(471): /replace="Ser"
  VARIANT (475)..(475): /replace="Arg"
  VARIANT (504)..(504): /replace="Ala"
  VARIANT (539)..(539): /replace="Asn
  SITE (1)..(735): /note="Variant residues given in the sequence have no preference with respect to those in the annotations for variant positions"

SEQ ID NO: 1221 - DNA, 2205 bp, Artificial Sequence; identical to SEQ ID NO: 929
  source: /note="Description of Artificial Sequence: Synthetic polynucleotide"
  variation (124)..(126): /replace="agt"
  variation (502)..(504): /replace="aaa"
  variation (928)..(930): /replace="aga"
  variation (1228)..(1230): /replace="cag"
  variation (1336)..(1338): /replace="aga"
  variation (1381)..(1383): /replace="ctc"
  variation (1411)..(1413): /replace="tct"
  variation (1423)..(1425): /replace="aga"
  variation (1510)..(1512): /replace="gcg"
  variation (1615)..(1617): /replace="gac"
  misc_feature (1)..(2205): /note="Variant residues given in the sequence have no preference with respect to those in the annotations for variant positions"

SEQ ID NO: 1222 - protein, 736 aa, Artificial Sequence; identical to SEQ ID NO: 930
  source: /note="Description of Artificial Sequence: Synthetic polypeptide"

SEQ ID NO: 1223 - protein, 736 aa, Artificial Sequence; identical to SEQ ID NO: 931
  source: /note="Description of Artificial Sequence: Synthetic polypeptide"

SEQ ID NO: 1224 - protein, 736 aa, Artificial Sequence; identical to SEQ ID NO: 932
  source: /note="Description of Artificial Sequence: Synthetic polypeptide"

SEQ ID NO: 1225 - protein, 736 aa, Artificial Sequence; identical to SEQ ID NO: 933
  source: /note="Description of Artificial Sequence: Synthetic polypeptide"

SEQ ID NO: 1226 - protein, 736 aa, Artificial Sequence; identical to SEQ ID NO: 934
  source: /note="Description of Artificial Sequence: Synthetic polypeptide"

SEQ ID NO: 1227 - protein, 736 aa, Artificial Sequence; identical to SEQ ID NO: 935
  source: /note="Description of Artificial Sequence: Synthetic polypeptide"

SEQ ID NO: 1228 - protein, 736 aa, Artificial Sequence; identical to SEQ ID NO: 936
  source: /note="Description of Artificial Sequence: Synthetic polypeptide"

SEQ ID NO: 1229 - protein, 736 aa, Artificial Sequence; identical to SEQ ID NO: 937
  source: /note="Description of Artificial Sequence: Synthetic polypeptide"

SEQ ID NO: 1230 - DNA, 2211 bp, Artificial Sequence; identical to SEQ ID NO: 938
  source: /note="Description of Artificial Sequence: Synthetic polynucleotide"

SEQ ID NO: 1231 - protein, 738 aa, Artificial Sequence; identical to SEQ ID NO: 18
  source: /note="Description of Artificial Sequence: Synthetic polypeptide"

SEQ ID NO: 1232 - protein, 738 aa, Artificial Sequence; identical to SEQ ID NO: 18
  source: /note="Description of Artificial Sequence: Synthetic polypeptide"

SEQ ID NO: 1233 - protein, 738 aa, Artificial Sequence
  source: /note="Description of Artificial Sequence: Synthetic polypeptide"
  VARIANT (157)..(157): /replace="Thr"
  VARIANT (169)..(169): /replace="Arg"
  VARIANT (457)..(457): /replace="Gly"
  VARIANT (463)..(463): /replace="Ala"
  VARIANT (508)..(508): /replace="Ala"
  VARIANT (510)..(510): /replace="Phe"
  VARIANT (511)..(511): /replace="Lys"
  VARIANT (558)..(558): /replace="Asn"
  VARIANT (585)..(585): /replace="His"
  VARIANT (587)..(587): /replace="Ala
  SITE (1)..(738): /note="Variant residues given in the sequence have no preference with respect to those in the annotations for variant positions"
MAADGYLPDWLEDNLSEGIREWWDLKPGAPKPKANQQKQDDGRGLVLPGYKYLGPFNGLDKGEPVNAADAAALEHDKAYDQQLKAGDNPYLRYNHADAEFQERLQEDTSFGGNLGRAVFQAKKRVLEPLGLVEEGAKTAPGKKRPVEQSPQEPDSSSLGIGKTGQQPAKKRLNFGQTGDSESVPDPQPLGEPPAAPSGVGSNTMASGGGAPMADNNEGADGVGNSSGNWHCDSTWLGDRVITTSTRTWALPTYNNHLYKQISNGTSGGSTNDNTYFGYSTPWGYFDFNRFHCHFSPRDWQRLINNNWGFRPKRLNFKLFNIQVKEVTTNEGTKTIANNLTSTVQVFTDSEYQLPYVLGSAHQGCLPPFPADVFMIPQYGYLTLNNGSQAVGRSSFYCLEYFPSQMLRTGNNFQFSYTFEDVPFHSSYAHSQSLDRLMNPLIDQYLYYLSRTQTTGTAGTQTLQFSQAGPSSMANQARNWVPGPCYRQQRVSTTTNQNNNSNFAWTGATKYHLNGRDSLMNPGVAMASHKDDEDRFFPSSGVLIFGKQGAGNDNVDYSQVMITNEEEIKTTNPVATEEYGAVATNNQSLANTQAQTGLVHNQGVLPGMVWQNRDVYLQGPIWAKIPHTDGNFHPSPLMGGFGLKHPPPQILIKNTPVPADPPTTFNQAKLNSFITQYSTGQVSVEIEWELQKENSKRWNPEIQYTSNYYKSTNVDFAVNTEGVYSEPRPIGTRYLTRNL

SEQ ID NO: 1234 - DNA, 2211 bp, Artificial Sequence
  source: /note="Description of Artificial Sequence: Synthetic polynucleotide"
  variation (469)..(471): /replace="acg"
  variation (502)..(504): /replace="aga"
  variation (1366)..(1368): /replace="gga"
  variation (1384)..(1386): /replace="gca"
  variation (1519)..(1521): /replace="gcc"
  variation (1525)..(1527): /replace="ttt"
  variation (1528)..(1530): /replace="aaa"
  variation (1669)..(1671): /replace="aac"
  variation (1750)..(1752): /replace="cac"
  variation (1756)..(1758): /replace="gcc"
  misc_feature (1)..(2211): /note="Variant residues given in the sequence have no preference with respect to those in the annotations for variant positions"
atggctgccgatggttatcttccagattggctcgaggacaacctctctgagggcattcgcgagtggtgggacttgaaacctggagccccgaaacccaaagccaaccagcaaaagcaggacgacggccggggtctggtgcttcctggctacaagtacctcggacccttcaacggactcgacaagggggagcccgtcaacgcggcggacgcagcggccctcgagcacgacaaagcctacgaccagcagctcaaagcgggtgacaatccgtacctgcggtataatcacgccgacgccgagtttcaggagcgtctgcaagaagatacgtcttttgggggcaacctcgggcgagcagtcttccaggccaagaagcgggttctcgaacctctcggtctggttgaggaaggcgctaagacggctcctggaaagaagaggccggtagagcagtcgccacaagagccagactcctcctcgggcatcggcaagacaggccagcagcccgctaaaaagagactcaattttggtcagactggcgactcagagtcagtccccgacccacaacctctcggagaacctccagcagccccctcaggtgtgggatctaatacaatggcttcaggcggtggcgctccaatggcagacaataacgaaggcgccgacggagtgggtaattcctcgggaaattggcattgcgattccacatggctgggggacagagtcatcaccaccagcacccgaacctgggccctgcccacctacaacaaccacctctacaagcaaatctccaacggcacctcgggaggaagcaccaacgacaacacctattttggctacagcaccccctgggggtattttgacttcaacagattccactgtcacttttcaccacgtgactggcaacgactcatcaacaacaattggggattccggcccaaaagactcaacttcaagctgttcaacatccaggtcaaggaagtcacgacgaacgaaggcaccaagaccatcgccaataatctcaccagcaccgtgcaggtctttacggactcggagtaccagttaccgtacgtgctaggatccgctcaccagggatgtctgcctccgttcccggcggacgtcttcatgattcctcagtacggctatttaactttaaacaatggaagccaagccgtgggacgttcctccttctactgtctggagtatttcccatcgcagatgctgagaaccggcaacaactttcagttcagctacaccttcgaggacgtgcctttccacagcagctacgcgcacagccagagcctggacaggctgatgaatcccctcatcgaccagtacctgtactacctgtccagaacgcaaacgactggaactgcagggacgcagactctgcaattcagccaagcgggtcctagctcaatggccaaccaggctagaaattgggtgcccggaccttgctaccggcagcagcgcgtctccacgacaaccaaccagaacaacaacagcaactttgcctggacgggagctaccaagtatcacctgaacggccgagactctctaatgaatccgggcgtggcaatggcttcccacaaggatgacgaggaccgcttcttcccttcgagcggggtcctgatttttggcaagcaaggagccgggaacgataatgtggattacagccaagtgatgattacaaatgaggaagaaatcaagactaccaaccccgtggccacagaagaatatggagcagtggccaccaacaaccagtccgccaatacgcaggcgcagaccggactcgtgcacaaccagggggtgcttcccggcatggtgtggcagaatagagacgtgtacctgcagggtcccatctgggccaaaattcctcacacggacggcaactttcacccgtctcccctgatgggcggctttggactgaagcacccgcctcctcaaattctcatcaagaacacaccggttccagcggacccgccgactaccttcaaccaggccaagctgaactctttcatcacgcagtacagcaccggacaggtcagcgtggaaatcgagtgggagctgcagaaagaaaacagcaaacgctggaatccagagattcaatacacttccaactactacaaatctacaaatgtggactttgctgtcaacacggagggggtttatagcgagcctcgccccattggcacccgttacctcacccgcaacctgtaa

SEQ ID NO: 1235 - protein, 733 aa, Artificial Sequence; identical to SEQ ID NO: 434
  source: /note="Description of Artificial Sequence: Synthetic polypeptide"

SEQ ID NO: 1236 - DNA, 4472 bp, Artificial Sequence
  source: /note="Description of Artificial Sequence: Synthetic polynucleotide"
ctccatcactaggggtaaccgcgaagcgcctcccacgctgccgcgtcagcgctgacgtaaattacgtcataggggagtggtcctgtattagctgtcacgtgagtgcttttgcgacattttgcgacaccacgtggccattcatggtatatatggccgagtgagcgagcaggatctccattttgaccgcgaaatttgaacgagcagcagccatgccgggcttctacgagatcgtgcttaaggtgccgagcgacctggacgagcacctgccgggcatttctgactcgtttgtgaactgggtggcagagaaggaatgggagctgcccccggattctgacatggatcggaatctgattgagcaggcacccctgaccgtggccgagaagctacagcgcgacttcctggtccaatggcgccgcgtgagtaaggccccggaggccctcttctttgttcagttcgagaagggcgagtcctacttccacctccatattctggtagagaccacgggggtcaaatccatggtgctgggccgcttcctgagtcagattcgggacaagctggtgcagaccatctaccgcgggatcgagccgaccctgcccaactggttcgcggtgacaaagacgcgtaatggcgccggaggggggaacaaggtggtggacgagtgctacatccccaactacctgctgcccaagactcagcccgagctgcagtgggcgtggactaacatggaggagtatataagcgcgtgcttgaacctggccgagcgcaaacggctcgtggcgcagcacctgacccacgtcagccagacccaggagcagaacaaggagaatctgaacccgaattctgacgcgcctgtcatccggtcaaaaacctccgcgcgctacatggagctggtcgggtggctggtggaccggggcatcacctccgagaagcagtggatccaggaggaccaggcctcgtacatctccttcaacgccgcctccaactcgcggtctcagatcaaggccgcgctggacaatgccggcaagatcatggcgctgaccaaatccgcgcccgactacctggtaggccccgctctgcccgcggacattaaatccaaccgcatctaccgcatcctggagctgaatggctacgaccctgcctacgccggttccgtctttctcggctgggcccagaaaaagtttggcaaaaggaacaccatctggctgtttgggccggccaccacgggcaagaccaacatcgcggaagccatcgcccacgccgtgcccttctacggctgcgtcaactggaccaatgagaactttcccttcaacgattgcgtcgacaagatggtgatctggtgggaggagggcaagatgacggccaaggtcgtggagtccgccaaggccattctcggcggcagcaaggtgcgcgtggaccaaaagtgcaagtcgtccgcccagatcgatcccacccccgtgatcgtcacctccaacaccaacatgtgcgccgtgattgacgggaacagcaccaccttcgagcaccagcagccgttgcaggaccggatgttcaaatttgaacttacccgccgtctggagcacgactttggcaaggtgacaaagcaggaagtcaaagagttcttccgctgggcgcaggatcacgtgaccgaggtggcgcatgagttctacgtcagaaagggtggagctaacaaaagacccgcccccgatgacgcggatataagcgagcccaagcgggcctgcccctcagtcgcggatccatcgacgtcagacgcggaaggagctccggtggactttgccgacaggtaccaaaacaaatgttctcgtcacgcgggcatgcttcagatgctgtttccctgcaaaacatgcgagagaatgaatcagaatttcaacatttgcttcacgcacgggaccagagactgttcagaatgtttccctggcgtgtcagaatctcaaccggtcgtcagaaaaaagacgtatcggaaactctgtgcgattcatcatctgctggggcgggcacccgagattgcttgctcggcctgcgacctggtcaacgtggacctggatgactgtgtttctgagcaataaatgacttaaaccaggtatggctgccgatggttatcttccagattggctcgaggacaacctctctgagggcattcgcgagtggtgggacctgaaacctggagccccgaaacccaaagccaaccagcaaaagcaggacaacggccggggtctggtgcttcctggctacaagtacctcggacccttcaacggactcgacaagggggagcccgtcaacgcggcggacgcagcggccctcgagcacgacaaggcctacgaccagcagctccaagcgggtgacaatccgtacctgcggtataatcacgccgacgccgagtttcaggagcgtctgcaagaagatacgtcttttgggggcaacctcgggcgcgcagtcttccaggccaaaaagcgggttctcgaacctctgggcctggttgaatcgccggttaagacggctcctggaaagaagagaccggtagagccatcaccccagcgctctccagactcctctacgggcatcggcaagaaaggccagcagcccgcaaaaaagagactcaattttgggcagactggcgactcagagtcagtccccgaccctcaaccaatcggagaaccaccagcaggcccctctggtctgggatctggtacaatggctgcaggcggtggcgctccaatggcagacaataacgaaggcgccgacggagtgggtagttcctcaggaaattggcattgcgattccacatggctgggcgacagagtcatcaccaccagcacccgcacctgggccctgcccacctacaacaaccacctctacaagcaaatctccaacgggacctcgggaggaagcaccaacgacaacacctacttcggctacagcaccccctgggggtattttgacttcaacagattccactgccacttttcaccacgtgactggcagcgactcatcaacaacaactggggattccggcccaagaggctcaacttcaagctcttcaacatccaagtcaaggaggtcacgcagaatgaaggcaccaagaccatcgccaataaccttaccagcacgattcaggtctttacggactcggaataccagctcccgtacgtgctcggctcggcgcaccagggctgcctgcctccgttcccggcggacgtcttcatgattcctcagtacgggtacctgactctgaacaatggcagtcaggctgtgggccggtcgtccttctactgcctggagtactttccttctcaaatgctgagaacgggcaacaactttgaattcagctacaacttcgaggacgtgcccttccacagcagctacgcgcacagccagagcctggaccggctgatgaaccctctcatcgaccagtacttgtactacctgtcccggactcaaagcacgggcggtactgcaggaactcagcagttgctattttctcaggccgggcctaacaacatgtcggctcaggccaagaactggctacccggtccctgctaccggcagcaacgcgtctccacgacactgtcgcagaacaacaacagcaactttgcctggacgggtgccaccaagtatcatctgaatggcagagactctctggtgaatcctggcgttgccatggctacccacaaggacgacgaagagcgattttttccatccagcggagtcttaatgtttgggaaacagggagctggaaaagacaacgtggactatagcagcgtgatgctaaccagcgaggaagaaataaagaccaccaacccagtggccacagaacagtacggcgtggtggccgataacctgcaacagcaaaacgccgctcctattgtaggggccgtcaatagtcaaggagccttacctggcatggtgtggcagaaccgggacgtgtacctgcagggtcccatctgggccaagattcctcatacggacggcaactttcatccctcgccgctgatgggaggctttggactgaagcatccgcctcctcagatcctgattaaaaacacacctgttcccgcggatcctccgaccaccttcactaaggccaagctggcttctttcatcacgcagtacagtaccggccaggtcagcgtggagatcgagtgggagctgcagaaggagaacagcaaacgctggaacccagagattcagtacacttccaactactacaaatctacaaatgtggactttgctgtcaatactgagggtacttattccgagcctcgccccattggcacccgttacctcacccgtaatctgtaattacatgttaatcaataaaccggttaattcgtttcagttgaactttggtctcctgtccttcttatcttatcggttaccatagaaactggttacttattaactgcttggtgcgcttcgcgataaaagacttacgtcatcgggttacccctagtgatgga

SEQ ID NO: 1237 - DNA, 2208 bp, Artificial Sequence
  source: /note="Description of Artificial Sequence: Synthetic polynucleotide"
atggctgccgatggttatcttccagattggctcgaggacactctctctgaaggaataagacagtggtggaagctcaaacctggcccaccaccaccaaagcccgcagagcggcataaggacgacagcaggggtcttgtgcttcctgggtacaagtacctcggacccttcaacggactcgacaagggagagccggtcaacgaggcagacgccgcggccctcgagcacgacaaagcctacgaccggcagctcgacagcggagacaacccgtacctcaagtacaaccacgccgacgcggagtttcaggagcgccttaaagaagatacgtcttttgggggcaacctcggacgagcagtcttccaggcgaaaaagagggttcttgaacctctgggcctggttgaggaacctgttaagaaggctccgggaaaaaagaggccggtagagcactctcctgtggagccagactcctcctcgggaaccggaaaggcgggccagcagcctgcaagaaaaagattgaattttggtcagactggagacgcagactcagtacctgacccccagcctctcggacagccaccagcagccccctctggtctgggaactaataccatggctacaggcagtggcgcaccaatggcagacaataacgagggtgccgacggagtgggtaattcctcgggaaattggcattgcgattccacatggatgggcgacagagtcatcaccaccagcacccgaacctgggccctgcccacctacaacaaccacctctacaaacaaatttccagccaatcaggagcctcgaacgacaatcactactttggctacagcaccccttgggggtattttgacttcaacagattccactgccacttttcaccacgtgactggcaaagactcatcaacaacaactggggattccgacccaagagactcaacttcaagctctttaacattcaagtcaaagaggtcacgcagaatgacggtacgacgacgattgccaataaccttaccagcacggttcaggtgtttactgactcggagtaccagctcccgtacgtcctcggctcggcgcatcaaggatgcctcccgccgttcccagcagacgtcttcatggtgccacagtatggatacctcaccctgaacaacgggagtcaggcagtaggacgctcttcattttactgcctggagtactttccttctcagatgctgcgtaccggaaacaactttaccttcagctacacttttgaggacgttcctttccacagcagctacgctcacagccagagtctggaccgtctcatgaatcctctcatcgaccagtacctgtattacttgagcagaacaaacactccaagtggaaccaccacgcagtcaaggcttcagttttctcaggccggagcgagtgacattcgggaccagtctaggaactggcttcctggaccctgttaccgccagcagcgagtatcaaagacatctgcggataacaacaacagtgaatactcgtggactggagctaccaagtaccacctcaatggcagagactctctggtgaatccgggcccggctatggcaagccacaaggacgatgaagaaaagttttttcctcagagcggggttctcatctttgggaagcaaggctcagagaaaacaaatgtggacattgaaaaggtcatgattacagacgaagaggaaatcaggacaaccaatcccgtggctacggagcagtatggttctgtatctaccaacctccagagaggcaacagacaagcagctaccgcagatgtcaacacacaaggcgttcttccaggcatggtctggcaggacagagatgtgtaccttcaggggcccatctgggcaaagattccacacacggacggacattttcacccctctcccctcatgggtggattcggacttaaacaccctcctccacagattctcatcaagaacaccccggtgcctgcgaatccttcgaccaccttcagtgcggcaaagtttgcttccttcatcacacagtactccacgggacaggtcagcgtggagatcgagtgggagctgcagaaggaaaacagcaaacgctggaatcccgaaattcagtacacttccaactacaacaagtctgttaatgtggactttactgtggacactaatggcgtgtattcagagcctcgccccattggcaccagatacctgactcgtaatctgtaa

SEQ ID NO: 1238 - protein, 735 aa, Artificial Sequence
  source: /note="Description of Artificial Sequence: Synthetic polypeptide"
MAADGYLPDWLEDTLSEGIRQWWKLKPGPPPPKPAERHKDDSRGLVLPGYKYLGPFNGLDKGEPVNEADAAALEHDKAYDRQLDSGDNPYLKYNHADAEFQERLKEDTSFGGNLGRAVFQAKKRVLEPLGLVEEPVKKAPGKKRPVEHSPVEPDSSSGTGKAGQQPARKRLNFGQTGDADSVPDPQPLGQPPAAPSGLGTNTMATGSGAPMADNNEGADGVGNSSGNWHCDSTWMGDRVITTSTRTWALPTYNNHLYKQISSQSGASNDNHYFGYSTPWGYFDFNRFHCHFSPRDWQRLINNNWGFRPKRLNFKLFNIQVKEVTQNDGTTTIANNLTSTVQVFTDSEYQLPYVLGSAHQGCLPPFPADVFMVPQYGYLTLNNGSQAVGRSSFYCLEYFPSQMLRTGNNFTFSYTFEDVPFHSSYAHSQSLDRLMNPLIDQYLYYLSRTNTPSGTTTQSRLQFSQAGASDIRDQSRNWLPGPCYRQQRVSKTSADNNNSEYSWTGATKYHLNGRDSLVNPGPAMASHKDDEEKFFPQSGVLIFGKQGSEKTNVDIEKVMITDEEEIRTTNPVATEQYGSVSTNLQRGNRQAATADVNTQGVLPGMVWQDRDVYLQGPIWAKIPHTDGHFHPSPLMGGFGLKHPPPQILIKNTPVPANPSTTFSAAKFASFITQYSTGQVSVEIEWELQKENSKRWNPEIQYTSNYNKSVNVDFTVDTNGVYSEPRPIGTRYLTRNL

SEQ ID NO: 1239 - DNA, 8376 bp, Artificial Sequence
  source: /note="Description of Artificial Sequence: Synthetic polynucleotide"
aattcccatcatcaataatataccttattttggattgaagccaatatgataatgagggggtggagtttgtgacgtggcgcggggcgtgggaacggggcgggtgacgtagtagtctctagagtcctgtattagaggtcacgtgagtgttttgcgacattttgcgacaccatgtggtcacgctgggtatttaagcccgagtgagcacgcagggtctccattttgaagcgggaggtttgaacgcgcagccaccacgccggggttttacgagattgtgattaaggtccccagcgaccttgacgggcatctgcccggcatttctgacagctttgtgaactgggtggccgagaaggaatgggagttgccgccagattctgacatggatctgaatctgattgagcaggcacccctgaccgtggccgagaagctgcagcgcgactttctgacggaatggcgccgtgtgagtaaggccccggaggcccttttctttgtgcaatttgagaagggagagagctacttccacatgcacgtgctcgtggaaaccaccggggtgaaatccatggttttgggacgtttcctgagtcagattcgcgaaaaactgattcagagaatttaccgcgggatcgagccgactttgccaaactggttcgcggtcacaaagaccagaaatggcgccggaggcgggaacaaggtggtggatgagtgctacatccccaattacttgctccccaaaacccagcctgagctccagtgggcgtggactaatatggaacagtatttaagcgcctgtttgaatctcacggagcgtaaacggttggtggcgcagcatctgacgcacgtgtcgcagacgcaggagcagaacaaagagaatcagaatcccaattctgatgcgccggtgatcagatcaaaaacttcagccaggtacatggagctggtcgggtggctcgtggacaaggggattacctcggagaagcagtggatccaggaggaccaggcctcatacatctccttcaatgcggcctccaactcgcggtcccaaatcaaggctgccttggacaatgcgggaaagattatgagcctgactaaaaccgcccccgactacctggtgggccagcagcccgtggaggacatttccagcaatcggatttataaaattttggaactaaacgggtacgatccccaatatgcggcttccgtctttctgggatgggccacgaaaaagttcggcaagaggaacaccatctggctgtttgggcctgcaactaccgggaagaccaacatcgcggaggccatagcccacactgtgcccttctacgggtgcgtaaactggaccaatgagaactttcccttcaacgactgtgtcgacaagatggtgatctggtgggaggaggggaagatgaccgccaaggtcgtggagtcggccaaagccattctcggaggaagcaaggtgcgcgtggaccagaaatgcaagtcctcggcccagatagacccgactcccgtgatcgtcacctccaacaccaacatgtgcgccgtgattgacgggaactcaacgaccttcgaacaccagcagccgttgcaagaccggatgttcaaatttgaactcacccgccgtctggatcatgactttgggaaggtcaccaagcaggaagtcaaagactttttccggtgggcaaaggatcacgtggttgaggtggagcatgaattctacgtcaaaaagggtggagccaagaaaagacccgcccccagtgacgcagatataagtgagcccaaacgggtgcgcgagtcagttgcgcagccatcgacgtcagacgcggaagcttcgatcaactacgcagacaggtaccaaaacaaatgttctcgtcacgtgggcatgaatctgatgctgtttccctgcagacaatgcgagagaatgaatcagaattcaaatatctgcttcactcacggacagaaagactgtttagagtgctttcccgtgtcagaatctcaacccgtttctgtcgtcaaaaaggcgtatcagaaactgtgctacattcatcatatcatgggaaaggtgccagacgcttgcactgcctgcgatctggtcaatgtggatttggatgactgcatctttgaacaataaatgatttaaatcaggtatggctgccgatggttatcttccagattggctcgaggacactctctctgaaggaataagacagtggtggaagctcaaacctggcccaccaccaccaaagcccgcagagcggcataaggacgacagcaggggtcttgtgcttcctgggtacaagtacctcggacccttcaacggactcgacaagggagagccggtcaacgaggcagacgccgcggccctcgagcacgacaaagcctacgaccggcagctcgacagcggagacaacccgtacctcaagtacaaccacgccgacgcggagtttcaggagcgccttaaagaagatacgtcttttgggggcaacctcggacgagcagtcttccaggcgaaaaagagggttcttgaacctctgggcctggttgaggaacctgttaagacggctccgggaaaaaagaggccggtagagcactctcctgtggagccagactcctcctcgggaaccggaaaggcgggccagcagcctgcaagaaaaagattgaattttggtcagactggagacgcagactcagtacctgacccccagcctctcggacagccaccagcagccccctctggtctgggaactaatacgatggctacaggcagtggcgcaccaatggcagacaataacgagggcgccgacggagtgggtaattcctcgggaaattggcattgcgattccacatggatgggcgacagagtcatcaccaccagcacccgaacctgggccctgcccacctacaacaaccacctctacaaacaaatttccagccaatcaggagcctcgaacgacaatcactactttggctacagcaccccttgggggtattttgacttcaacagattccactgccacttttcaccacgtgactggcaaagactcatcaacaacaactggggattccgacccaagagactcaacttcaagctctttaacattcaagtcaaagaggtcacgcagaatgacggtacgacgacgattgccaataaccttaccagcacggttcaggtgtttactgactcggagtaccagctcccgtacgtcctcggctcggcgcatcaaggatgcctcccgccgttcccagcagacgtcttcatggtgccacagtatggatacctcaccctgaacaacgggagtcaggcagtaggacgctcttcattttactgcctggagtactttccttctcagatgctgcgtaccggaaacaactttaccttcagctacacttttgaggacgttcctttccacagcagctacgctcacagccagagtctggaccgtctcatgaatcctctcatcgaccagtacctgtattacttgagcagaacaaacactccaagtggaaccaccacgcagtcaaggcttcagttttctcaggccggagcgagtgacattcgggaccagtctaggaactggcttcctggaccctgttaccgccagcagcgagtatcaaagacatctgcggataacaacaacagtgaatactcgtggactggagctaccaagtaccacctcaatggcagagactctctggtgaatccgggcccggccatggcaagccacaaggacgatgaagaaaagttttttcctcagagcggggttctcatctttgggaagcaaggctcagagaaaacaaatgtggacattgaaaaggtcatgattacagacgaagaggaaatcaggacaaccaatcccgtggctacggagcagtatggttctgtatctaccaacctccagagaggcaacagacaagcagctaccgcagatgtcaacacacaaggcgttcttccaggcatggtctggcaggacagagatgtgtaccttcaggggcccatctgggcaaagattccacacacggacggacattttcacccctctcccctcatgggtggattcggacttaaacaccctcctccacagattctcatcaagaacaccccggtacctgcgaatccttcgaccaccttcagtgcggcaaagtttgcttccttcatcacacagtactccacgggacaggtcagcgtggagatcgagtgggagctgcagaaggaaaacagcaaacgctggaatcccgaaattcagtacacttccaactacaacaagtctgttaatgtggactttactgtggacactaatggcgtgtattcagagcctcgccccattggcaccagatacctgactcgtaatctgtaattgcttgttaatcaataaaccgtttaattcgtttcagttgaactttggtctctgcgtatttctttcttatctagtttccatgctctagagtcctgtattagaggtcacgtgagtgttttgcgacattttgcgacaccatgtggtcacgctgggtatttaagcccgagtgagcacgcagggtctccattttgaagcgggaggtttgaacgcgcagccaccacggcggggttttacgagattgtgattaaggtccccagcgaccttgacgggcatctgcccggcatttctgacagctttgtgaactgggtggccgagaaggaatgggagttgccgccagattctgacatggatctgaatctgattgagcaggcacccctgaccgtggccgagaagctgcatcgctggcgtaatagcgaagaggcccgcaccgatcgcccttcccaacagttgcgcagcctgaatggcgaatggaattccagacgattgagcgtcaaaatgtaggtatttccatgagcgtttttcctgttgcaatggctggcggtaatattgttctggatattaccagcaaggccgatagtttgagttcttctactcaggcaagtgatgttattactaatcaaagaagtattgcgacaacggttaatttgcgtgatggacagactcttttactcggtggcctcactgattataaaaacacttctcaggattctggcgtaccgttcctgtctaaaatccctttaatcggcctcctgtttagctcccgctctgattctaacgaggaaagcacgttatacgtgctcgtcaaagcaaccatagtacgcgccctgtagcggcgcattaagcgcggcgggtgtggtggttacgcgcagcgtgaccgctacacttgccagcgccctagcgcccgctcctttcgctttcttcccttcctttctcgccacgttcgccggctttccccgtcaagctctaaatcgggggctccctttagggttccgatttagtgctttacggcacctcgaccccaaaaaacttgattagggtgatggttcacgtagtgggccatcgccctgatagacggtttttcgccctttgacgttggagtccacgttctttaatagtggactcttgttccaaactggaacaacactcaaccctatctcggtctattcttttgatttataagggattttgccgatttcggcctattggttaaaaaatgagctgatttaacaaaaatttaacgcgaattttaacaaaatattaacgtttacaatttaaatatttgcttatacaatcttcctgtttttggggcttttctgattatcaaccggggtacatatgattgacatgctagttttacgattaccgttcatcgattctcttgtttgctccagactctcaggcaatgacctgatagcctttgtagagacctctcaaaaatagctaccctctccggcatgaatttatcagctagaacggttgaatatcatattgatggtgatttgactgtctccggcctttctcacccgtttgaatctttacctacacattactcaggcattgcatttaaaatatatgagggttctaaaaatttttatccttgcgttgaaataaaggcttctcccgcaaaagtattacagggtcataatgtttttggtacaaccgatttagctttatgctctgaggctttattgcttaattttgctaattctttgccttgcctgtatgatttattggatgttggaattcctgatgcggtattttctccttacgcatctgtgcggtatttcacaccgcatatggtgcactctcagtacaatctgctctgatgccgcatagttaagccagccccgacacccgccaacacccgctgacgcgccctgacgggcttgtctgctcccggcatccgcttacagacaagctgtgaccgtctccgggagctgcatgtgtcagaggttttcaccgtcatcaccgaaacgcgcgagacgaaagggcctcgtgatacgcctatttttataggttaatgtcatgataataatggtttcttagacgtcaggtggcacttttcggggaaatgtgcgcggaacccctatttgtttatttttctaaatacattcaaatatgtatccgctcatgagacaataaccctgataaatgcttcaataatattgaaaaaggaagagtatgagtattcaacatttccgtgtcgcccttattcccttttttgcggcattttgccttcctgtttttgctcacccagaaacgctggtgaaagtaaaagatgctgaagatcagttgggtgcacgagtgggttacatcgaactggatctcaacagcggtaagatccttgagagttttcgccccgaagaacgttttccaatgatgagcacttttaaagttctgctatgtggcgcggtattatcccgtattgacgccgggcaagagcaactcggtcgccgcatacactattctcagaatgacttggttgagtactcaccagtcacagaaaagcatcttacggatggcatgacagtaagagaattatgcagtgctgccataaccatgagtgataacactgcggccaacttacttctgacaacgatcggaggaccgaaggagctaaccgcttttttgcacaacatgggggatcatgtaactcgccttgatcgttgggaaccggagctgaatgaagccataccaaacgacgagcgtgacaccacgatgcctgtagcaatggcaacaacgttgcgcaaactattaactggcgaactacttactctagcttcccggcaacaattaatagactggatggaggcggataaagttgcaggaccacttctgcgctcggcccttccggctggctggtttattgctgataaatctggagccggtgagcgtgggtctcgcggtatcattgcagcactggggccagatggtaagccctcccgtatcgtagttatctacacgacggggagtcaggcaactatggatgaacgaaatagacagatcgctgagataggtgcctcactgattaagcattggtaactgtcagaccaagtttactcatatatactttagattgatttaaaacttcatttttaatttaaaaggatctaggtgaagatcctttttgataatctcatgaccaaaatcccttaacgtgagttttcgttccactgagcgtcagaccccgtagaaaagatcaaaggatcttcttgagatcctttttttctgcgcgtaatctgctgcttgcaaacaaaaaaaccaccgctaccagcggtggtttgtttgccggatcaagagctaccaactctttttccgaaggtaactggcttcagcagagcgcagataccaaatactgtccttctagtgtagccgtagttaggccaccacttcaagaactctgtagcaccgcctacatacctcgctctgctaatcctgttaccagtggctgctgccagtggcgataagtcgtgtcttaccgggttggactcaagacgatagttaccggataaggcgcagcggtcgggctgaacggggggttcgtgcacacagcccagcttggagcgaacgacctacaccgaactgagatacctacagcgtgagctatgagaaagcgccacgcttcccgaagggagaaaggcggacaggtatccggtaagcggcagggtcggaacaggagagcgcacgagggagcttccagggggaaacgcctggtatctttatagtcctgtcgggtttcgccacctctgacttgagcgtcgatttttgtgatgctcgtcaggggggcggagcctatggaaaaacgccagcaacgcggcctttttacggttcctggccttttgctggccttttgctcacatgttctttcctgcgttatcccctgattctgtggataaccgtattaccgcctttgagtgagctgataccgctcgccgcagccgaacgaccgagcgcagcgagtcagtgagcgaggaagcggaagagcgcccaatacgcaaaccgcctctccccgcgcgttggccgattcattaatgca

SEQ ID NO: 1240 - DNA, 1085 bp, Artificial Sequence
  source: /note="Description of Artificial Sequence: Synthetic polynucleotide"
  modified_base (611)..(611): a, c, t, or g
  modified_base (640)..(640): a, c, t, or g
  modified_base (1039)..(1039): a, c, t, or g
tgcccacttacaacaaccatctctacaagcaaatctccagcvvmdcaggagctascaacgacaaccactactttggctacagcaccccttgggggtattttgactttaacagattccactgccacttctcaccacgtgactggcagcgactcattaacaacaactggggattccggcccaagaaactcagcttcaagctcttcaacatccaagttagaggggtcacgcagaacgatggcacgacgactattgccaataaccttaccagcacggttcaagtgtttacggactcggagtatcagctcccgtacgtgctcgggtcggcgcaccaaggctgtctcccgccgtttccagcggacgtcttcatggtccctcagtatggatacctcaccctgaacaacggaagtcaagcggtgggacgctcatccttttactgcctggagtacttcccttcgcagatgctaaggactggaaataacttccaattcagctataccttcgaggatgtaccttttcacagcagctacgctcacagccagagtttggatcgcttgatgaatcctcttattgatcagtatctgtactacctgaacagaacgcaargcamcvcnrgcggaacarccrvcmhsmrsvvsctgvngtttagccaggctgggcctcagtctatgtctttgcaggccagaaattggctacctgggccctgctaccggcaacagagactttcaamarycbmcrvcsrsaacaacaacagtrastttccttggmcagcggccagcamatatcatctcaatggccgcgactcgctggtgaatccaggaccagctatggccagtcacrrggacgatrmsgrsaratttttccctatgcacggcaatctaatatttggcaaasaarrcrscrvsrvarvcratrycgmsdwcgrsvrsgtaatgattacggatgaagaagagattcgtaccaccaatcctgtggcaacagagcagtatggaactgtggcaaataacttgcagrvsvvsmrsrvcvvscccacgdhtvvsrnsgtcvmscatcagggggccttacctggcatggtgtggcaagatcgt

SEQ ID NO: 1241 - protein, 620 aa, Artificial Sequence
  source: /note="Description of Artificial Sequence: Synthetic polypeptide"
  MOD_RES (263)..(264): Any naturally occurring amino acid
  MOD_RES (267)..(267): Any naturally occurring amino acid
  MOD_RES (450)..(453): Any naturally occurring amino acid
  MOD_RES (456)..(460): Any naturally occurring amino acid
  MOD_RES (462)..(462): Any naturally occurring amino acid
  MOD_RES (491)..(495): Any naturally occurring amino acid
  MOD_RES (500)..(500): Any naturally occurring amino acid
  MOD_RES (504)..(504): Any naturally occurring amino acid
  MOD_RES (508)..(508): Any naturally occurring amino acid
  MOD_RES (528)..(528): Any naturally occurring amino acid
  MOD_RES (531)..(533): Any naturally occurring amino acid
  MOD_RES (546)..(557): Any naturally occurring amino acid
  MOD_RES (586)..(590): Any naturally occurring amino acid
  MOD_RES (593)..(595): Any naturally occurring amino acid
  MOD_RES (597)..(597): Any naturally occurring amino acid
MAADGYLPDWLEDNLSEGIREWWALKPGVPQPKANQQHQDNRRGLVLPGYKYLGPGNGLDKGEPVNEADAAALEHDKAYDQQLKAGDNPYLKYNHADAEFQERLQEDTSFGGNLGRAVFQAKKRILEPLGLVEEAAKTAPGKKGAVDQSPQEPDSSSGVGKSGKQPARKRLNFGQTGDSESVPDPQPLGEPPAAPTSLGSNTMASGGGAPMADNNEGADGVGNSSGNWHCDSQWLGDRVITTSTRTWALPTYNNHLYKQISSXXGAXNDNHYFGYSTPWGYFDFNRFHCHFSPRDWQRLINNNWGFRPKKLSFKLFNIQVRGVTQNDGTTTIANNLTSTVQVFTDSEYQLPYVLGSAHQGCLPPFPADVFMVPQYGYLTLNNGSQAVGRSSFYCLEYFPSQMLRTGNNFQFSYTFEDVPFHSSYAHSQSLDRLMNPLIDQYLYYLNRTQXXXXGTXXXXXLXFSQAGPQSMSLQARNWLPGPCYRQQRLSXXXXXNNNSXFPWXAASXYHLNGRDSLVNPGPAMASHXDDXXXFFPMHGNLIFGKXXXXXXXXXXXXVMITDEEEIRTTNPVATEQYGTVANNLQXXXXXPTXXXVXHQGALPGMVWQDRDVYLQGPIWA

SEQ ID NO: 1242 - DNA, 1491 bp, Artificial Sequence
  source: /note="Description of Artificial Sequence: Synthetic polynucleotide"
accaccagcaccagaacctgggccctgcccacttacaacaaccatctctacaagcaaatctccagccaatcaggagcttcaaacgacaaccactactttggctacagcaccccttgggggtattttgactttaacagattccactgccacttctcaccacgtgactggcagcgactcattaacaacaactggggattccggcccaagaaactcagcttcaagctcttcaacatccaagttagaggggtcacgcagaacgatggcacgacgactattgccaataaccttaccagcacggttcaagtgtttacggactcggagtatcagctcccgtacgtgctcgggtcggcgcaccaaggctgtctcccgccgtttccagcggacgtcttcatggtccctcagtatggatacctcaccctgaacaacggaagtcaagcggtgggacgctcatccttttactgcctggagtacttcccttcgcagatgctaaggactggaaataacttccaattcagctataccttcgaggatgtaccttttcacagcagctacgctcacagccagagtttggatcgcttgatgaatcctcttattgatcagtatctgtactacctgaacagaacgcaaggaacaacctctggaacaaccaaccaatcacggctgctttttagccaggctgggcctcagtctatgtctttgcaggccagaaattggctacctgggccctgctaccggcaacagagactttcaaagactgctaacgacaacaacaacagtaactttccttggacagcggccagcaaatatcatctcaatggccgcgactcgctggtgaatccaggaccagctatggccagtcacaaggacgatgaagaaaaatttttccctatgcacggcaatctaatatttggcaaagaagggacaacggcaagtaacgcagaattagataatgtaatgattacggatgaagaagagattcgtaccaccaatcctgtggcaacagagcagtatggaactgtggcaaataacttgcagagctcaaatacagctcccacgactggaactgtcaatcatcagggggccttacctggcatggtgtggcaagatcgtgacgtctaccttcaaggacctatctgggcaaagattcctcacacggatggacactttcatccttctcctctgatgggaggctttggactgaaacatccgcctcctcaaatcatgatcaaaaatactccggtaccggcaaatcctccgacgactttcagcccggccaagtttgcttcatttatcactcagtactccactggacaggtcagcgtggaaattgagtgggagctacagaaagaaaacagcaaacgttggaatccagagattcagtacacttccaactacaacaagtctgttaatgtggactttactgtagacactaatggtgtttatagtgaacctcgccctattggaacccggtatctcacacgaaacttgtga

SEQ ID NO: 1243 - protein, 482 aa, Artificial Sequence
  source: /note="Description of Artificial Sequence: Synthetic polypeptide"
TTSTRTWALPTYNNHLYKQISSQSGASNDNHYFGYSTPWYFDFNRFHCHFSPRDWQRLNNNWGFRPKKLSFKLFNIQRGVTQNDGTTTIANNLTSTQVFTDSEYQLPYVLGSAHQCLPPFPADVFMVPQYGYLTNNGSQAVGRSSFYCLEYFPQMLRTGNNFQFSYTFEDVPHSSYAHSQSLDRLMNPLIDYLYYLNRTQGTTSGTTNQSLLFSQAGPQSMSLQARNWLGPCYRQQRLSKTANDNNNSFPWTAASKYHLNGRDSLVNGPAMASHKDDEEKFFPMHGLIFGKEGTTASNAELDNVMITDEEEIRTTNPVATEQYGTVANNLQSSNTAPTTGTVNHQGALPGMVWQDRDVYLQGPIWAKIPHTDGHFHPSPLMGGFGLKHPPPQIMIKNTPVPANPPTTFSPAKFASFITQYSTGQVSVEIEWELQKENSKRWNPEIQYTSNYNKSVNVDFTVDTNGVYSEPRPIGTRYLTRNL

SEQ ID NO: 1244 - DNA, 1140 bp, Artificial Sequence
  source: /note="Description of Artificial Sequence: Synthetic polynucleotide"
  modified_base (636)..(636): a, c, t, or g
  modified_base (665)..(665): a, c, t, or g
  modified_base (1064)..(1064): a, c, t, or g
accaccagcaccagaacctgggccctgcccacttacaacaaccatctctacaagcaaatctccagcvvmdcaggagctascaacgacaaccactactttggctacagcaccccttgggggtattttgactttaacagattccactgccacttctcaccacgtgactggcagcgactcattaacaacaactggggattccggcccaagaaactcagcttcaagctcttcaacatccaagttagaggggtcacgcagaacgatggcacgacgactattgccaataaccttaccagcacggttcaagtgtttacggactcggagtatcagctcccgtacgtgctcgggtcggcgcaccaaggctgtctcccgccgtttccagcggacgtcttcatggtccctcagtatggatacctcaccctgaacaacggaagtcaagcggtgggacgctcatccttttactgcctggagtacttcccttcgcagatgctaaggactggaaataacttccaattcagctataccttcgaggatgtaccttttcacagcagctacgctcacagccagagtttggatcgcttgatgaatcctcttattgatcagtatctgtactacctgaacagaacgcaargcamcvcnrgcggaacarccrvcmhsmrsvvsctgvngtttagccaggctgggcctcagtctatgtctttgcaggccagaaattggctacctgggccctgctaccggcaacagagactttcaamarycbmcrvcsrsaacaacaacagtrastttccttggmcagcggccagcamatatcatctcaatggccgcgactcgctggtgaatccaggaccagctatggccagtcacrrggacgatrmsgrsaratttttccctatgcacggcaatctaatatttggcaaasaarrcrscrvsrvarvcratrycgmsdwcgrsvrsgtaatgattacggatgaagaagagattcgtaccaccaatcctgtggcaacagagcagtatggaactgtggcaaataacttgcagrvsvvsmrsrvcvvscccacgdhtvvsrnsgtcvmscatcagggggccttacctggcatggtgtggcaagatcgtgacgtctaccttcaaggacctatctgggca

SEQ ID NO: 1245 - protein, 620 aa, Artificial Sequence; identical to SEQ ID NO: 1241
  source: /note="Description of Artificial Sequence: Synthetic polypeptide"
  MOD_RES (263)..(264): Any naturally occurring amino acid
  MOD_RES (267)..(267): Any naturally occurring amino acid
  MOD_RES (450)..(453): Any naturally occurring amino acid
  MOD_RES (456)..(460): Any naturally occurring amino acid
  MOD_RES (462)..(462): Any naturally occurring amino acid
  MOD_RES (491)..(495): Any naturally occurring amino acid
  MOD_RES (500)..(500): Any naturally occurring amino acid
  MOD_RES (504)..(504): Any naturally occurring amino acid
  MOD_RES (508)..(508): Any naturally occurring amino acid
  MOD_RES (528)..(528): Any naturally occurring amino acid
  MOD_RES (531)..(533): Any naturally occurring amino acid
  MOD_RES (546)..(557): Any naturally occurring amino acid
  MOD_RES (586)..(590): Any naturally occurring amino acid
  MOD_RES (593)..(595): Any naturally occurring amino acid
  MOD_RES (597)..(597): Any naturally occurring amino acid

SEQ ID NO: 1246 - protein, 738 aa, Artificial Sequence; identical to SEQ ID NO: 18
  source: /note="Description of Artificial Sequence: Synthetic polypeptide"

SEQ ID NO: 1247 - DNA, 2258 bp, Artificial Sequence
  source: /note="Description of Artificial Sequence: Synthetic polynucleotide"
tcgaggacaacctctctgagggcattcgcgagtggtgggacttgaaacctggagccccgaaacccaaagccaaccagcaaaagcaggacgacggccggggtctggtgcttcctggctacaagtacctcggacccttcaacggactcgacaagggggagcccgtcaacgcggcggacgcagcggccctcgagcacgacaaggcctacgaccagcagctcaaagcgggtgacaatccgtacctgcggtataaccacgccgacgccgagtttcaggagcgtctgcaagaagatacgtcttttgggggcaacctcgggcgagcagtcttccaggccaagaagcgggttctcgaacctctcggtctggttgaggaaggcgctaagacggctcctggaaagaagagaccggtagagccatcaccccagcgttctccagactcctctacgggcatcggcaagaaaggccagcagcccgcgaaaaagagactcaactttgggcagactggcgactcagagtcagtgcccgaccctcaaccaatcggagaaccccccgcaggcccctctggtctgggatctggtacaatggctgcaggcggtggcgctccaatggcagacaataacgaaggcgccgacggagtgggtagttcctcaggaaattggcattgcgattccacatggctgggcgacagagtcatcaccaccagcacccgaacctgggccctccccacctacaacaaccacctctacaagcaaatctccaacgggacttcgggaggaagcaccaacgacaacacctacttcggctacagcaccccctgggggtattttgactttaacagattccactgccacttctcaccacgtgactggcagcgactcatcaacaacaactggggattccggcccaagagactcaacttcaagctcttcaacatccaggtcaaggaggtcacgcagaatgaaggcaccaagaccatcgccaataaccttaccagcacgattcaggtctttacggactcggaataccagctcccgtacgtcctcggctctgcgcaccagggctgcctgcctccgttcccggcggacgtcttcatgattcctcagtacgggtacctgactctgaacaatggcagtcaggccgtgggccgttcctccttctactgcctggagtactttccttctcaaatgctgagaacgggcaacaactttgagttcagctaccagtttgaggacgtgccttttcacagcagctacgcgcacagccaaagcctggaccggctgatgaaccccctcatcgaccagtacctgtactacctgtctcggactcagtccacgggaggtaccgcaggaactcagcagttgctattttctcaggccgggcctaataacatgtcggctcaggccaaaaactggctacccgggccctgctaccggcagcaacgcgtctccacgacactgtcgcaaaataacaacagcaactttgcctggaccggtgccaccaagtatcatctgaatggcagagactctctggtaaatcccggtgtcgctatggcaacccacaaggacgacgaagagcgattttttccgtccagcggagtcttaatgtttgggaaacagggagctggaaaagacaacgtggactatagcagcgttatgctaaccagtgaggaagaaattaaaaccaccaacccagtggccacagaacagtacggcgtggtggccgataacctgcaacagcaaaacgccgctcctattgtaggggccgtcaacagtcaaggagccttacctggcatggtctggcagaaccgggacgtgtacctgcagggtcctatctgggccaagattcctcacacggacggaaactttcatccctcgccgctgatgggaggctttggactgaaacacccgcctcctcagatcctgattaagaatacacctgttcccgcggatcctccaactaccttcagtcaagctaagctggcgtcgttcatcacgcagtacagcaccggacaggtcagcgtggaaattgaatgggagctgcagaaagaaaacagcaaacgctggaacccagagattcaatacacttccaactactacaaatctacaaatgtggactttgctgttaacacagatggcacttattctgagcctcgccccatcggcacccgttacctcacccgtaatctgtaattgcttgttaatcaataaaccggttgattcgtttcagttgaactttggtctctgcgaagggcgaattcgttt

SEQ ID NO: 1248 - DNA, 2208 bp, Artificial Sequence
  source: /note="Description of Artificial Sequence: Synthetic polynucleotide"
atggctgccgatggttatcttccagattggctcgaggacactctctctgaaggaataagacagtggtggaagctcaaacctggcccaccaccaccaaagcccgcagagcggcataaggacgacagcaggggtcttgtgcttcctgggtacaagtacctcggacccttcaacggactcgacaagggagagccggtcaacgaggcagacgccgcggccctcgagcacgacaaagcctacgaccggcagctcgacagcggagacaacccgtacctcaagtacaaccacgccgacgcggagtttcaggagcgccttaaagaagatacgtcttttgggggcaacctcggacgagcagtcttccaggcgaaaaagagggttcttgaacctctgggcctggttgaggaacctgttaagacggctccgggaaaaaagaggccggtagagcactctcctgtggagccagactcctcctcgggaaccggaaaggcgggccagcagcctgcaagaaaaagattgaattttggtcagactggagacgcagactcagtacctgacccccagcctctcggacagccaccagcagccccctctggtctgggaactaatacgatggctacaggcagtggcgcaccaatggcagacaataacgagggcgccgacggagtgggtaattcctcgggaaattggcattgcgattccacatggatgggcgacagagtcatcaccaccagcacccgaacctgggccctgcccacctacaacaaccacctctacaaacaaatttccagccaatcaggagcctcgaacgacaatcactactttggctacagcaccccttgggggtattttgacttcaacagattccactgccacttttcaccacgtgactggcaaagactcatcaacaacaactggggattccgacccaagagactcaacttcaagctctttaacattcaagtcaaagaggtcacgcagaatgacggtacgacgacgattgccaataaccttaccagcacggttcaggtgtttactgactcggagtaccagctcccgtacgtcctcggctcggcgcatcaaggatgcctcccgccgttcccagcagacgtcttcatggtgccacagtatggatacctcaccctgaacaacgggagtcaggcagtaggacgctcttcattttactgcctggagtactttccttctcagatgctgcgtaccggaaacaactttaccttcagctacacttttgaggacgttcctttccacagcagctacgctcacagccagagtctggaccgtctcatgaatcctctcatcgaccagtacctgtatttcttaagcagaacaaacactccaagtggaaccaccacgcagtcaaggcttcagttttctcaggccggagcgagtgacattcgggaccagtctaggaactggcttcctggaccctgttaccgccagcagcgagtatcaaagacatctgcggataacaacaacagtgaattctcgtggaccggtgctaccaagtaccacctcaatggcagagactctctggtgaatccgggcccggccatggcaagccacaaggacgatgaagaaaagttttttcctcagagcggggttctcatctttgggaagcaaggctcagagaaaacaaatgtggacattgaaaaggtcatgattacagacgaagaggaaatcaggacaaccaatcccgtggctacggagcagtatggttctgtatctaccaacctccagagaggcaacagacaagcagctaccgcagatgtcaacacacaaggcgttcttccaggcatggtctggcaggacagagatgtgtaccttcaggggcccatctgggcaaagattccacacacggacggacattttcacccctctcccctcatgggtggattcggacttaaacaccctcctccacagattctcatcaagaacaccccggtacctgcgaatccttcgaccaccttcagtgcggcaaagtttgcttccttcatcacacagtactccacgggacaggtcagcgtggagatcgagtgggagctgcagaaggaaaacagcaaacgctggaatcccgaaattcagtacacttccaactacaacaagtctgttaatgtggactttactgtggacactaatggcgtgtattcagagcctcgccccattggtaccagattcctgactcgtaatctgtaa

SEQ ID NO: 1249 - protein, 737 aa, Artificial Sequence
  source: /note="Description of Artificial Sequence: Synthetic polypeptide"
MAADGYLPDWLEDNLSEGIREWWDLKPGAPKPKANQQKQDNGRGLVLPGYKYLGPFNGLDKGEPVNAADAAALEHDKAYDQQLQAGDNPYLRYNHADAEFQERLQEDTSFGGNLGRAVFQAKKRVLEPLGLVESPVKTAPGKKRPVEPSPQRSPDSSTGIGKKGQQPAKKRLNFGQTGDSESVPDPQPIGEPPAAPSGVGPNTMAAGGGAPMADNNEGADGVGSSSGNWHCDSTWLGDRVITTSTRTWALPTYNNHLYKQISNGTSGGSTNDNTYFGYSTPWGYFDFNRFHCHFSPRDWQRLINNNWGFRPKRLNFKLFNIQVKEVTQNEGTKTIANNLTSTIQVFTDSEYQLPYVLGSAHQGCLPPFPADVFMIPQYGYLTLNNGSQAVGRSSFYCLEYFPSQMLRTGNNFEFSYNFEDVPFHSSYAHSQSLDRLMNPLIDQYLYYLSRTQSTGGTAGTQQLLFSQAGPNNMSAQAKNWLPGPCYRQQRVSTTLSQNNNSNFAWTGATKYHLNGRDSLVNPGVAMATHKDDEERFFPSSGVLMFGKQGAGKDNVDYSSVMLTSEEEIKTTNPVATEQYGWADNLQQQNAAPIVGAVNSQGALPGMVWQNRDVYLQGPIWAKIPHTDGNFHPSPLMGGFGLKHPPPQILIKNTPVPADPPTTFNQAKLASFITQYSTGQVSVEIEWELQKENSKRWNPEIQYTSNYYKSTNVDFAVNTEGTYSEPRPIGTRYLTRNL

SEQ ID NO: 1250 - DNA, 2211 bp, Artificial Sequence
  source: /note="Description of Artificial Sequence: Synthetic polynucleotide"
atggctgccgatggttatcttccagattggctcgaggacactctctctgaaggaataagacagtggtggaagctcaaacctggcccaccaccaccaaagcccgcagagcggcataaggacgacagcaggggtcttgtgcttcctgggtacaagtacctcggacccttcaacggactcgacaagggagagccggtcaacgaggcagacgccgcggccctcgagcacgacaaagcctacgaccggcagctcgacagcggagacaacccgtacctcaagtacaaccacgccgacgcggagtttcaggagcgccttaaagaagatacgtcttttgggggcaacctcggacgagcagtcttccaggcgaaaaagagggttcttgaacctctgggcctggttgaggaacctgttaagacggctccgggaaaaaagaggccggtagagcactctcctgtggagccagactcctcctcgggaaccggaaaggcgggccagcagcctgcaagaaaaagattgaattttggtcagactggagacgcagactcagtacctgacccccagcctctcggacagccaccagcagccccctctggtctgggaactaatacgatggctacaggcagtggcgcaccaatggcagacaataacgagggcgccgacggagtgggtaattcctcgggaaattggcattgcgattccacatggatgggcgacagagtcatcaccaccagcacccgaacctgggccctgcccacctacaacaaccacctctacaaacaaatttccagcgcttcaacgggagcctcgaacgacaatcactactttggctacagcaccccttgggggtattttgacttcaacagattccactgccacttttcaccacgtgactggcaaagactcatcaacaacaactggggattccgacccaagagactcaacttcaagctctttaacattcaagtcaaagaggtcacgcagaatgacggtacgacgacgattgccaataaccttaccagcacggttcaggtgtttactgactcggagtaccagctcccgtacgtcctcggctcggcgcatcaaggatgcctcccgccgttcccagcagacgtcttcatggtgccacagtatggatacctcaccctgaacaacgggagtcaggcagtaggacgctcttcattttactgcctggagtactttccttctcagatgctgcgtaccggaaacaactttaccttcagctacacttttgaggacgttcctttccacagcagctacgctcacagccagagtctggaccgtctcatgaatcctctcatcgaccagtacctgtattacttgagcagaacaaacactccaagtggaaccaccacgcagtcaaggcttcagttttctcaggccggagcgagtgacattcgggaccagtctaggaactggcttcctggaccctgttaccgccagcagcgagtatcaaagacatctgcggataacaacaacagtgaatactcgtggactggagctaccaagtaccacctcaatggcagagactctctggtgaatccgggcccggccatggcaagccacaaggacgatgaagaaaagttttttcctcagagcggggttctcatctttgggaagcaaggctcagagaaaacaaatgtggacattgaaaaggtcatgattacagacgaagaggaaatcaggacaaccaatcccgtggctacggagcagtatggttctgtatctaccaacctccagagaggcaacagacaagcagctaccgcagatgtcaacacacaaggcgttcttccaggcatggtctggcaggacagagatgtgtaccttcaggggcccatctgggcaaagattccacacacggacggacattttcacccctctcccctcatgggtggattcggacttaaacaccctcctccacagattctcatcaagaacaccccggtacctgcgaatccttcgaccaccttcagtgcggcaaagtttgcttccttcatcacacagtactccacgggacaggtcagcgtggagatcgagtgggagctgcagaaggaaaacagcaaacgctggaatcccgaaattcagtacacttccaactacgccaagtctgtcaatgtggactttactgtggacaataatggcgtgtattcagagcctcgccccattggcaccagatacctgactcgtaatctgtaa

SEQ ID NO: 1251 - DNA, 2208 bp, Artificial Sequence
  source: /note="Description of Artificial Sequence: Synthetic polynucleotide"
atggctgccgatggttatcttccagattggctcgaggacaacctctctgagggcattcgcgagtggtgggacttgaaacctggagccccgaagcccaaagccaaccagcaaaagcaggacgacggccggggtctggtgcttcctggctacaagtacctcggacccttcaacggactcgacaagggggagcccgtcaacgcggcggacgcagcggccctcgagcacgacaaggcctacgaccagcagctcaaagcgggtgacaatccgtacctgcggtataaccacgccgacgccgagtttcaggagcgtctgcaagaagatacgtcttttgggggcaacctcgggcgagcagtcttccaggccaagaagcgggttctcgaacctctcggtctggttgaggaaggcgctaagacggctcctggaaagaaacgtccggtagagcagtcgccacaagagccagactcctcctcgggcatcggcaagacaggccagcagcccgctaaaaagagactcaattttggtcagactggcgactcagagtcagtccccgatccacaacctctcggagaacctccagcaacccccgctgctgtgggacctactacaatggcttcaggcggtggcgcaccaatggcagacaataacgaaggcgccgacggagtgggtaatgcctcaggaaattggcattgcgattccacatggctgggcgacagagtcatcaccaccagcacccgcacctgggccttgcccacctacaataaccacctctacaagcaaatctccagtgcttcaggggccagcaacgacaaccactacttcggctacagcaccccctgggggtattttgatttcaacagattccactgccacttttcaccacgtgactggcagcgactcatcaacaacaattggggattccggcccaagagactcaacttcaaactcttcaacatccaagtcaaggaggtcacgacgaatgatggcgtcacaaccatcgctaataaccttaccagcacggttcaagtcttctcggactcggagtaccagcttccgtacgtcctcggctctgcgcaccagggctgcctccctccgttcccggcggacgtgttcatgattccgcaatacggctacctgacgctcaacaatggcagccaagccgtgggacgttcatccttttactgcctggaatatttcccttctcagatgctgagaacgggcaacaactttaccttcagctacacctttgaggaagtgcctttccacagcagctacgcgcacagccagagcctggaccggctgatgaatcctctcatcgaccaatacctgtattacctgaacagaactcaaaatcagtccggaagtgcccaaaacaaggacttgctgtttagccgtgggtctccagctggcatgtctgttcagcccaaaaactggctacctggaccctgttatcggcagcagcgcgtttctaaaacaaaaacagacaacaacaacagcaattttacctggactggtgcttcaaaatataacctcaatgggcgtgaatccatcatcaaccctggcactgctatggcctcacacaaagacgacgaagacaagttctttcccatgagcggtgtcatgatttttggaaaagagagcgccggagcttcaaacactgcattggacaatgtcatgattacagacgaagaggaaattaaagccactaaccctgtggccaccgaaagatttgggaccgtggcagtcaatttccagagcagcagcacagaccctgcgaccggagatgtgcatgctatgggagcattacctggcatggtgtggcaagatagagacgtgtacctgcagggtcccatttgggccaaaattcctcacacagatggacactttcacccgtctcctcttatgggcggctttggactcaagaacccgcctcctcagatcctcatcaaaaacacgcctgttcctgcgaatcctccggcggagttttcagctacaaagtttgcttcattcatcacccaatactccacaggacaagtgagtgtggaaattgaatgggagctgcagaaagaaaacagcaagcgctggaatcccgaagtgcagtacacatccaattatgcaaaatctgccaacgttgattttactgtggacaacaatggactttatactgagcctcgccccattggcacccgttaccttacccgtcccctgtaa

SEQ ID NO: 1252 - DNA, 2205 bp, Artificial Sequence
  source: /note="Description of Artificial Sequence: Synthetic polynucleotide"
atggctgccgatggttatcttccagattggctcgaggacaacctctdgagggcattcgcgagtggtgggacttgaaacctggagccccgaaacccaaagccaaccagcaaaagcaggacgacggccggggtdggtgcttcctggctacaagtacctcggacccttcaacggactcgacaagggggagcccgtcaacgcggcggatgcagcggccctcgagcacgacaaggcctacgaccagcagctcaaagcgggtgacaatccgtacctgcggtataaccacgccgacgccgagtttcaggagcgtctgcaagaagatacgtcttttgggggcaacctcgggcgagcagtcttccaggccaagaagagggttctcgaaccttttggtdggttgaggaaggtgctaagacggctcctggaaagaaacgtccggtagagcagtcgccacaagagccagactcctcctcgggcattggcaagacaggccagcagcccgctaaaaagagactcaattttggtcagactggcgactcagagtcagtccccgacccacaacctctcggagaacctccagcaacccccgctgctgtgggacctactacaatggcttcaggcggtggcgcaccaatggcagacaataacgaaggcgccgacggagtgggtaatgcctcaggaaattggcattgcgattccacatggctgggcgacagagtcatcaccaccagcacccgaacatgggccttgcccacctataacaaccacctctacaagcaaatctccagtgcttcaggggccagcaacgacaaccactacttcggctacagcaccccctgggggtattttgatttcaacagattccactgccatttctcaccacgtgactggcagcgactcatcaacaacaattggggattccggcccaagagactcaacttcaagctcttcaacatccaagtcaaggaggtcacgacgaatgatggcgtcacgaccatcgctaataaccttaccagcacggttcaagtcttctcggactcggagtaccagttgccgtacgtcctcggctctgcgcaccagggctgcctccctccgttcccggcggacgtgttcatgattccgcagtacggctacctaacgctcaacaatggcagccaggcagtgggacggtcatccttttactgcctggaatatttcccatcgcagatgctgagaacgggcaataactttaccttcagctacaccttcgaggacgtgcctttccacagcagctacgcgcacagccagagcctggaccggctgatgaatcctctcatcgaccagtacctgtattacctgaacagaactcagaatcagtccggaagtgcccaaaacaaggacttgctgtttagccgggggtctccagctggcatgtctgttcagcccaaaaactggctacctggaccctgttaccggcagcagcgcgtttctaaaacaaaaacagacaacaacaacagcaactttacctggactggtgcttcaaaatataaccttaatgggcgtgaatctataatcaaccctggcactgctatggcctcacacaaagacgacaaagacaagttctttcccatgagcggtgtcatgatttttggaaaggagagcgccggagcttcaaacactgcattggacaatgtcatgatcacagacgaagaggaaatcaaagccactaaccccgtggccaccgaaagatttgggactgtggcagtcaatctccagagcagcagcacagaccctgcgaccggagatgtgcatgttatgggagccttacctggaatggtgtggcaagacagagacgtatacctgcagggtcctatttgggccaaaattcctcacacggatggacactttcacccgtctcctctcatgggcggctttggacttaagcacccgcctcctcagatcctcatcaaaaacacgcctgttcctgcgaatcctccggcagagttttcggctacaaagtttgcttcattcatcacccagtattccacaggacaagtgagcgtggagattgaatgggagctgcagaaagaaaacagcaaacgctggaatcccgaagtgcagtatacatctaactatgcaaaatctgccaacgttgatttcactgtggacaacaatggactttatactgagcctcgccccattggcacccgttacctcacccgtcccctgtaa

SEQ ID NO: 1253 - DNA, 2208 bp, Artificial Sequence
  source: /note="Description of Artificial Sequence: Synthetic polynucleotide"
atggctgccgatggttatcttccagattggctcgaggacaacctctctgagggcattcgcgagtggtgggacttgaaacctggagccccgaaacccaaagccaaccagcaaaagcaggacgacggccggggtctggtgcttcctggctacaagtacctcggacccttcaacggactcgacaagggggagcccgtcaacgcggcggatgcagcggccctcgagcacgacaaggcctacgaccagcagctcaaagcgggtgacaatccgtacctgcggtataaccacgccgacgccgagtttcaggagcgtctgcaagaagatacgtcttttgggggcaacctcgggcgagcagtcttccaggccaagaagagggttctcgaaccttttggtctggttgaggaaggtgctaagacggctcctggaaagaaacgtccggtagagcagtcgccacaagagccagactcctcctcgggcattggcaagacaggccagcagcccgctaaaaagagactcaattttggtcagactggcgactcagagtcagtccccgacccacaacctctcggagaacctccagcaacccccgctgctgtgggacctactacaatggcttcaggcggtggcgcaccaatggcagacaataacgaaggcgccgacggagtgggtaatgcctcaggaaattggcattgcgattccacatggctgggcgacagagtcatcaccaccagcacccgaacatgggccttgcccacctataacaaccacctctacaagcaaatctccagtgcttcaggggccagcaacgacaaccactacttcggctacagcaccccctgggggtattttgatttcaacagattccactgccatttctcaccacgtgactggcagcgactcatcaacaacaattggggattccggcccaagagactcaacttcaagctcttcaacatccaagtcaaggaggtcacgacgaatgatggcgtcacgaccatcgctaataaccttaccagcacggttcaagtcttctcggactcggagtaccagttgccgtacgtcctcggctctgcgcaccagggctgcctccctccgttcccggcggacgtgttcatgattccgcagtacggctacctaacgctcaacaatggcagccaggcagtgggacggtcatccttttactgcctggaatatttcccatcgcagatgctgagaacgggcaataactttaccttcagctacaccttcgaggacgtgcctttccacagcagctacgcgcacagccagagcctggaccggctgatgaatcctctcatcgaccagtacctgtattacctgaacagaactcagaatcagtccggaagtgcccaaaacaaggacttgctgtttagccgggggtctccagctggcatgtctgttcagcccaaaaactggctacctggaccctgttaccggcagcagcgcgtttctaaaacaaaaacagacaacaacaacagcaactttacctggactggtgcttcaaaatataaccttaatgggcgtgaatctataatcaaccctggcactgctatggcctcacacaaagacgacgaagacaagttctttcccatgagcggtgtcatgatttttggaaaggagagcgccggagcttcaaacactgcattggacaatgtcatgatcacagacgaagaggaaatcaaagccactaaccccgtggccaccgaaagatttgggactgtggcagtcaatctccagagcagcagcacagaccctgcgaccggagatgtgcatgttatgggagccttacctggaatggtgtggcaagacagagacgtatacctgcagggtcctatttgggccaaaattcctcacacggatggacactttcacccgtctcctctcatgggcggctttggacttaagcacccgcctcctcagatcctcatcaaaaacacgcctgttcctgcgaatcctccggcagagttttcggctacaaagtttgcttcattcatcacccagtattccacaggacaagtgagcgtggagattgaatgggagctgcagaaagaaaacagcaaacgctggaatcccgaagtgcagtatacatctaactatgcaaaatctgccaacgttgatttcactgtggacaacaatggactttatactgagcctcgccccattggcacccgttacctcacccgtcccctgtaa

SEQ ID NO: 1254 - DNA, 2208 bp, Artificial Sequence
  source: /note="Description of Artificial Sequence: Synthetic polynucleotide"
atggctgccgatggttatcttccagattggctcgaggacactctctctgaaggaataagacagtggtggaagctcaaacctggcccaccaccaccaaagcccgcagagcggcataaggacgacagcaggggtcttgtgcttcctgggtacaagtacctcggacccttcaacggactcgacaagggagagccggtcaacgaggcagacgccgcggccctcgagcacgacaaagcctacgaccggcagctcgacagcggagacaacccgtacctcaagtacaaccacgccgacgcggagtttcaggagcgccttaaagaagatacgtcttttgggggcaacctcggacgagcagtcttccaggcgaaaaagagggttcttgaacctctgggcctggttgaggaacctgttaagacggctccgggaaaaaagaggccggtagagcactctcctgtggagccagactcctcctcgggaaccggaaaggcgggccagcagcctgcaagaaaaagattgaattttggtcagactggagacgcagactcagtacctgacccccagcctctcggacagccaccagcagccccctctggtctgggaactaatacgatggctacaggcagtggcgcaccaatggcagacaataacgagggcgccgacggagtgggtaattcctcgggaaattggcattgcgattccacatggatgggcgacagagtcatcaccaccagcacccgaacctgggccctgcccacctacaacaaccacctctacaaacaaatttccagccaatcaggagcctcgaacgacaatcactactttggctacagcaccccttgggggtattttgacttcaacagattccactgccacttttcaccacgtgactggcaaagactcatcaacaacaactggggattccgacccaagagactcaacttcaagctctttaacattcaagtcaaagaggtcacgcagaatgacggtacgacgacgattgccaataaccttaccagcacggttcaggtgtttactgactcggagtaccagctcccgtacgtcctcggctcggcgcatcaaggatgcctcccgccgttcccagcagacgtcttcatggtgccacagtatggatacctcaccctgaacaacgggagtcaggcagtaggacgctcttcattttactgcctggagtactttccttctcagatgctgcgtaccggaaacaactttaccttcagctacacttttgaggacgttcctttccacagcagctacgctcacagccagagtctggaccgtctcatgaatcctctcatcgaccagtacctgtattacttgagcagaacaaacactccaagtggaaccaccacgcagtcaaggcttcagttttctgtggccggacccagtaacatggctgtccagggaaggaactggcttcctggaccctgttaccgccagcagcgagtatcaaagacatctgcggataacaacaacagtgaatttgcttggactggagctaccaagtaccacctcaatggcagagactctctggtgaatccgggcccggccatggcaagccacaaggacgatgaagaaaagttttttcctcagagcggggttctcatctttgggaagcaaggctcagagaaaacaaatgtggacattgaaaaggtcatgattacagacgaagaggaaatcaggacaaccaatcccgtggctacggagcagtatggttctgtatctaccaacctccagcaacagaacacagcaccagctaccgcagatgtcaacacacaaggcgttcttccaggcatggtctggcaggacagagatgtgtaccttcaggggcccatctgggcaaagattccacacacggacggacattttcacccctctcccctcatgggtggattcggacttaaacaccctcctccacagattctcatcaagaacaccccggtacctgcgaatccttcgaccaccttcagtgcggcaaagtttgcttccttcatcacacagtactccacgggacaggtcagcgtggagatcgagtgggagctgcagaaggaaaacagcaaacgctggaatcccgaaattcagtacacttccaactacaacaagtctgttaatgtggactttactgtggacactaatggcgtgtattcagagcctcgccccattggcaccagatacctgactcgtaatctgtaa

SEQ ID NO: 1255 - protein, 735 aa, Artificial Sequence
  source: /note="Description of Artificial Sequence: Synthetic polypeptide"
MAADGYLPDWLEDTLSEGIRQWWKLKPGPPPPKPAERHKDDSRGLVLPGYKYLGPFNGLDKGEPVNEADAAALEHDKAYDRQLDSGDNPYLKYNHADAEFQERLKEDTSFGGNLGRAVFQAKKRVLEPLGLVEEPVKTAPGKKRPVEHSPVEPDSSSGTGKAGQQPARKRLNFGQTGDADSVPDPQPLGQPPAAPSGLGTNTMATGSGAPMADNNEGADGVGNSSGNWHCDSTWMGDRVITTSTRTWALPTYNNHLYKQISSQSGASNDNHYFGYSTPWGYFDFNRFHCHFSPRDWQRLINNNWGFRPKRLNFKLFNIQVKEVTQNDGTTTIANNLTSTVQVFTDSEYQLPYVLGSAHQGCLPPFPADVFMVPQYGYLTLNNGSQAVGRSSFYCLEYFPSQMLRTGNNFTFSYTFEDVPFHSSYAHSQSLDRLMNPLIDQYLYYLSRTNTPSGTTTQSRLQFSVAGPSNMAVQGRNWLPGPCYRQQRVSKTSADNNNSEFAWTGATKYHLNGRDSLVNPGPAMASHKDDEEKFFPQSGVLIFGKQGSEKTNVDIEKVMITDEEEIRTTNPVATEQYGSVSTNLQQQNTAPATADVNTQGVLPGMVWQDRDVYLQGPIWAKIPHTDGHFHPSPLMGGFGLKHPPPQILIKNTPVPANPSTTFSAAKFASFITQYSTGQVSVEIEWELQKENSKRWNPEIQYTSNYNKSVNVDFTVDTNGVYSEPRPIGTRYLTRNL

SEQ ID NO: 1256 - DNA, 2208 bp, Artificial Sequence
  source: /note="Description of Artificial Sequence: Synthetic polynucleotide"
atggctgccgatggttatcttccagattggctcgaggacactctctctgaaggaataagacagtggtggaagctcaaacctggcccaccaccaccaaagcccgcagagcggcataaggacgacagcaggggtcttgtgcttcctgggtacaagtacctcggacccttcaacggactcgacaagggagagccggtcaacgaggcagacgccgcggccctcgagcacgacaaagcctacgaccggcagctcgacagcggagacaacccgtacctcaagtacaaccacgccgacgcggagtttcaggagcgccttaaagaagatacgtcttttgggggcaacctcggacgagcagtcttccaggcgaaaaagaggattcttgaacctctgggcctggttgaggaacctgttaagacggctccgggaaaaaagaggccggtagagcactctcctgcggagccagactcctcctcgggaaccggaaagtcgggccagcagcctgcaagaaaaagattgaattttggtcagactggagacgcagactcagtacctgacccccagcctctcggacagccaccagcagccccctctggtctgggaactaatacgatggcttcaggcagtggcgcaccaatggcagacaataacgagggcgccgacggagtgggtaattcctcgggaaattggcattgcgattccacatggatgggcgacagagtcatcaccaccagcacccgaacctgggccctgcccacctacaacaaccacctctacaaacaaatttccagccaatcaggagcctcgaacgacaatcactactttggctacagcaccccttgggggtattttgacttcaacagattccactgccacttttcaccacgtgactggcaaagactcatcaacaacaactggggattccgacccaagagactcagcttcaagctctttaacattcaagtcaaagaggtcacgcagaatgacggtacgacgacgattgccaataaccttaccagcacggttcaggtgtttactgactcggagtaccagctcccgtacgtcctcggctcggcgcatcaaggatgcctcccgccgttcccagcagacgtcttcatggtgccacagtatggatacctcaccctgaacaacgggagtcaggcagtaggacgctcttcattttactgcctggagtactttccttctcagatgctgcgtaccggaaacaactttaccttcagctacacttttgaggacgttcctttccacagcagctacgctcacagccagagtctggaccgtctcatgaatcctctcatcgaccagtacctgtattacttgagcagaacaaacactccaagtggaaccaccacgatgtcaaggcttcagttttctcaggccggagcgagtgacattcgggaccagtctaggaactggcttcctggaccctgttaccgccagcagcgagtatcaaagacagctgcggataacaacaacagtgattactcgtggactggagctaccaagtaccacctcaatggcagagactctctggtgaatccgggcccggccatggcaagccacaaggacgatgaagaaaagtattttcctcagagcggggttctcatctttgggaagcaagactcaggaaaaacaaatgtggacattgaaaaggtcatgattacagacgaagaggaaatcaggacaaccaatcccgtggctacggagcagtatggttctgtatctaccaacctccagagcggcaacacacaagcagctacctcagatgtcaacacacaaggcgttcttccaggcatggtctggcaggacagagatgtgtaccttcaggggcccatctgggcaaagattccacacacggacggacattttcacccctctcccctcatgggtggattcggacttaaacaccctcctccacagattctcatcaagaacaccccggtacctgcgaatccttcgaccaccttcagtgcggcaaagtttgcttccttcatcacacagtactccacgggacaggtcagcgtggagatcgagtgggagctgcagaaggaaaacagcaaacgctggaatcccgaaattcagtacacttccaactacaacaagtctgttaatgtggactttactgtggacactaatggcgtgtattcagagcctcgccccattggcaccagatacctgactcgtaatctgtaa

SEQ ID NO: 1257 - DNA, 2208 bp, Artificial Sequence
  source: /note="Description of Artificial Sequence: Synthetic polynucleotide"
atggctgccgatggttatcttccagattggctcgaggacactctctctgaaggaataagacagtggtggaagctcaaacctggcccaccaccaccaaagcccgcagagcggcataaggacgacagcaggggtcttgtgcttcctgggtacaagtacctcggacccttcaacggactcgacaagggagagccggtcaacgaggcagacgccgcggccctcgagcacgacaaagcctacgaccggcagctcgacagcggagacaacccgtacctcaagtacaaccacgccgacgcggagtttcaggagcgccttaaagaagatacgtcttttgggggcaacctcggacgagcagtcttccaggcgaaaaagaggattcttgaacctctgggcctggttgaggaacctgttaagacggctccgggaaaaaagaggccggtagagcactctcctgcggagccagactcctcctcgggaaccggaaagtcgggccagcagcctgcaagaaaaagattgaattttggtcagactggagacgcagactcagtacctgacccccagcctctcggacagccaccagcagccccctctggtctgggaactaatacgatggcttcaggcagtggcgcaccaatggcagacaataacgagggcgccgacggagtgggtaattcctcgggaaattggcattgcgattccacatggatgggcgacagagtcatcaccaccagcacccgaacctgggccctgcccacctacaacaaccacctctacaaacaaatttccagccaatcaggagcctcgaacgacaatcactactttggctacagcaccccttgggggtattttgacttcaacagattccactgccacttttcaccacgtgactggcaaagactcatcaacaacaactggggattccgacccaagagactcaacttcaagctctttaacattcaagtcaaagaggtcacgcagaatgacggtacgacgacgattgccaataaccttaccagcacggttcaggtgtttactgactcggagtaccagctcccgtacgtcctcggctcggcgcatcaaggatgcctcccgccgttcccagcagacgtcttcatggtgccacagtatggatacctcaccctgaacaacgggagtcaggcagtaggacgctcttcattttactgcctggagtactttccttctcagatgctgcgtaccggaaacaactttaccttcagctacacttttgaggacgttcctttccacagcagctacgctcacagccagagtctggaccgtctcatgaatcctctcatcgaccagtacctgtattacttgagcagaacaaacactccaagtggaaccaccacgatgtcaaggcttcagttttctcaggccggagcgagtgacattcgggaccagtctaggaactggcttcctggaccctgttaccgccagcagcgagtatcaaagacagctgcggataacaacaacagtgattactcgtggactggagctaccaagtaccacctcaatggcagagactctctggtgaatccgggcccggccatggcaagccacaaggacgatgaagaaaagtattttcctcagagcggggttctcatctttgggaagcaagactcaggaaaaacaaatgtggacattgaaaaggtcatgattacagacgaagaggaaatcaggacaaccaatcccgtggctacggagcagtatggttctgtatctaccaacctccagagcggcaacacacaagcagctacctcagatgtcaacacacaaggcgttcttccaggcatggtctggcaggacagagatgtgtaccttcaggggcccatctgggcaaagattccacacacggacggacattttcacccctctcccctcatgggtggattcggacttaaacaccctcctccacagattctcatcaagaacaccccggtacctgcgaatccttcgaccaccttcagtgcggcaaagtttgcttccttcatcacacagtactccacgggacaggtcagcgtggagatcgagtgggagctgcagaaggaaaacagcaaacgctggaatcccgaaattcagtacacttccaactacaacaagtctgttaatgtggactttactgtggacactaatggcgtgtattcagagcctcgccccattggcaccagatacctgactcgtaatctgtaa

SEQ ID NO: 1258 - protein, 735 aa, Artificial Sequence
  source: /note="Description of Artificial Sequence: Synthetic polypeptide"
MAADGYLPDWLEDTLSEGIRQWWKLKPGPPPPKPAERHKDDSRGLVLPGYKYLGPFNGLDKGEPVNEADAAALEHDKAYDRQLDSGDNPYLKYNHADAEFQERLKEDTSFGGNLGRAVFQAKKRILEPLGLVEEPVKTAPGKKRPVEHSPAEPDSSSGTGKSGQQPARKRLNFGQTGDADSVPDPQPLGQPPAAPSGLGTNTMASGSGAPMADNNEGADGVGNSSGNWHCDSTWMGDRVITTSTRTWALPTYNNHLYKQISSQSGASNDNHYFGYSTPWGYFDFNRFHCHFSPRDWQRLINNNWGFRPKRLNFKLFNIQVKEVTQNDGTTTIANNLTSTVQVFTDSEYQLPYVLGSAHQGCLPPFPADVFMVPQYGYLTLNNGSQAVGRSSFYCLEYFPSQMLRTGNNFTFSYTFEDVPFHSSYAHSQSLDRLMNPLIDQYLYYLSRTNTPSGTTTMSRLQFSQAGASDIRDQSRNWLPGPCYRQQRVSKTAADNNNSDYSWTGATKYHLNGRDSLVNPGPAMASHKDDEEKYFPQSGVLIFGKQDSGKTNVDIEKVMITDEEEIRTTNPVATEQYGSVSTNLQSGNTQAATSDVNTQGVLPGMVWQDRDVYLQGPIWAKIPHTDGHFHPSPLMGGFGLKHPPPQILIKNTPVPANPSTTFSAAKFASFITQYSTGQVSVEIEWELQKENSKRWNPEIQYTSNYNKSVNVDFTVDTNGVYSEPRPIGTRYLTRNL

SEQ ID NO: 1259 - protein, 736 aa, Artificial Sequence
  source: /note="Description of Artificial Sequence: Synthetic polypeptide"
MAADGYLPDWLEDNLSEGIREWWDLKPGAPKPKANQQKQDDGRGLVLPGYKYLGPFNGLDKGEPVNAADAAALEHDKAYDQQLKAGDNPYLRYNHADAEFQERLQEDTSFGGNLGRAVFQAKKRVLEPFGLVEEGAKTAPGKKRPVEQSPQEPDSSSGIGKTGQQPAKKRLNFGQTGDSESVPDPQPLGEPPATPAAVGPTTMASGGGAPMADNNEGADGVGNASGNWHCDSTWLGDRVITTSTRTWALPTYNNHLYKQISSASTGASNDNHYFGYSTPWGYFDFNRFHCHFSPRDWQRLINNNWGFRPKRLNFKLFNIQVKEVTTNDGVTTIANNLTSTVQVFSDSEYQLPYVLGSAHQGCLPPFPADVFMIPQYGYLTLNNGSQAVGRSSFYCLEYFPSQMLRTGNNFTFSYTFEDVPFHSSYAHSQSLDRLMNPLIDQYLYFLNRTQNQSGSAQNKDLLFSRGSPAGMSVQPKNWLPGPCYRQQRVSKTKTDNNNSNFTWTGASKYNLNGRESIINPGTAMASHKDDKDKFFPMSGVMIFGKESAGASNTALDNVMITDEEEIKATNPVATERFGTVAVNLQSSSTDPATGDVHVMGALPGMVWQDRDVYLQGPIWAKIPHTDGHFHPSPLMGGFGLKHPPPQILIKNTPVPANPPAEFSATKFASFITQYSTGQVSVEIEWELQKENSKRWNPEVQYTSNYAKSANVDFTVDNNGLYTEPRPIGTRYLTRPL

SEQ ID NO: 1260 - protein, 747 aa, Artificial Sequence
  source: /note="Description of Artificial Sequence: Synthetic polypeptide"
MAADGYLPDWLEDTLSEGIRQWWKLKPGPPPPKPAERHKDDSRGLVLPGYKYLGPFNGLDKGEPVNEADAAALEHDKAYDRQLDSGDNPYLKYNHADAEFQERLKEDTSFGGNLGRAVFQAKKRVLEPLGLVEEPVKTAPGKKRPVEHSPVEPDSSSGTGKAGQQPARKRLNFGQTGDADSVPDPQPLGQPPAAPSGLGTNTMATGSGAPMADNNEGADGVGNSSGNWHCDSTWMGDRVITTSTRTWALPTYNNHLYKQISSQSGASNDNHYFGYSTPWGYFDFNRFHCHFSPRDWQRLINNNWGFRPKRLNFKLFNIQVKEVTQNDGTTTIANNLTSTVQVFTDSEYQLPYVLGSAHQGCLPPFPADVFMVPQYGYLTLNNGSQAVGRSSFYCLEYFPSQMLRTGNNFTFSYTFEDVPFHSSYAHSQSLDRLMNPLIDQYLYYLSRTNTPSGTTTQSRLQFSQAGASDIRDQSRNWLPGPCYRQQRVSKTSADNNNSEYSWTGATKYHLNGRDSLVNPGPAMASHKDDEEKFFPQSGVLIFGKQGSEKTNVDIEKVMITDEEEIRTTNPVATEQYGSVSTNLQRGNAAAGSTPPPMAARQAATADVNTQGVLPGMVWQDRDVYLQGPIWAKIPHTDGHFHPSPLMGGFGLKHPPPQILIKNTPVPANPSTTFSAAKFASFITQYSTGQVSVEIEWELQKENSKRWNPEIQYTSNYNKSVNVDFTVDTNGVYSEPRPIGTRYLTRNL

SEQ ID NO: 1261 - protein, 747 aa, Artificial Sequence
  source: /note="Description of Artificial Sequence: Synthetic polypeptide"
MAADGYLPDWLEDTLSEGIRQWWKLKPGPPPPKPAERHKDDSRGLVLPGYKYLGPFNGLDKGEPVNEADAAALEHDKAYDRQLDSGDNPYLKYNHADAEFQERLKEDTSFGGNLGRAVFQAKKRVLEPLGLVEEPVKTAPGKKRPVEHSPVEPDSSSGTGKAGQQPARKRLNFGQTGDADSVPDPQPLGQPPAAPSGLGTNTMATGSGAPMADNNEGADGVGNSSGNWHCDSTWMGDRVITTSTRTWALPTYNNHLYKQISSQSGASNDNHYFGYSTPWGYFDFNRFHCHFSPRDWQRLINNNWGFRPKRLNFKLFNIQVKEVTQNDGTTTIANNLTSTVQVFTDSEYQLPYVLGSAHQGCLPPFPADVFMVPQYGYLTLNNGSQAVGRSSFYCLEYFPSQMLRTGNNFTFSYTFEDVPFHSSYAHSQSLDRLMNPLIDQYLYYLSRTNTPSGTTTQSRLQFSQAGASDIRDQSRNWLPGPCYRQQRVSKTSADNNNSEYSWTGATKYHLNGRDSLVNPGPAMASHKDDEEKFFPQSGVLIFGKQGSEKTNVDIEKVMITDEEEIRTTNPVATEQYGSVSTNLQRGNAAAGETRAPLAARQAATADVNTQGVLPGMVWQDRDVYLQGPIWAKIPHTDGHFHPSPLMGGFGLKHPPPQILIKNTPVPANPSTTFSAAKFASFITQYSTGQVSVEIEWELQKENSKRWNPEIQYTSNYNKSVNVDFTVDTNGVYSEPRPIGTRYLTRNL

SEQ ID NO: 1262 - protein, 7 aa, Artificial Sequence
  source: /note="Description of Artificial Sequence: Synthetic peptide"
TLAVPFK

SEQ ID NO: 1263 - protein, 7 aa, Artificial Sequence
  source: /note="Description of Artificial Sequence: Synthetic peptide"
KFPVALT

SEQ ID NO: 1264 - protein, 6 aa, Artificial Sequence
  source: /note="Description of Artificial Sequence: Synthetic peptide"
LAVPFK

SEQ ID NO: 1265 - protein, 5 aa, Artificial Sequence
  source: /note="Description of Artificial Sequence: Synthetic peptide"
AVPFK

SEQ ID NO: 1266 - protein, 4 aa, Artificial Sequence
  source: /note="Description of Artificial Sequence: Synthetic peptide"
VPFK

SEQ ID NO: 1267 - protein, 6 aa, Artificial Sequence
  source: /note="Description of Artificial Sequence: Synthetic peptide"
TLAVPF

SEQ ID NO: 1268 - protein, 5 aa, Artificial Sequence
  source: /note="Description of Artificial Sequence: Synthetic peptide"
TLAVP

SEQ ID NO: 1269 - protein, 4 aa, Artificial Sequence
  source: /note="Description of Artificial Sequence: Synthetic peptide"
TLAV

SEQ ID NO: 1270 - protein, 7 aa, Artificial Sequence
  source: /note="Description of Artificial Sequence: Synthetic peptide"
SVSKPFL

SEQ ID NO: 1271 - protein, 7 aa, Artificial Sequence
  source: /note="Description of Artificial Sequence: Synthetic peptide"
FTLTTPK

SEQ ID NO: 1272 - protein, 7 aa, Artificial Sequence
  source: /note="Description of Artificial Sequence: Synthetic peptide"
MNATKNV

SEQ ID NO: 1273 - protein, 7 aa, Artificial Sequence
  source: /note="Description of Artificial Sequence: Synthetic peptide"
QSSQTPR

SEQ ID NO: 1274 - protein, 7 aa, Artificial Sequence
  source: /note="Description of Artificial Sequence: Synthetic peptide"
ILGTGTS

SEQ ID NO: 1275 - protein, 7 aa, Artificial Sequence
  source: /note="Description of Artificial Sequence: Synthetic peptide"
TRTNPEA

SEQ ID NO: 1276 - protein, 7 aa, Artificial Sequence
  source: /note="Description of Artificial Sequence: Synthetic peptide"
NGGTSSS

SEQ ID NO: 1277 - protein, 7 aa, Artificial Sequence
  source: /note="Description of Artificial Sequence: Synthetic peptide"
YTLSQGW

SEQ ID NO: 1278 - DNA, 21 bp, Artificial Sequence
  source: /note="Description of Artificial Sequence: Synthetic oligonucleotide"
aagtttcctgtggcgttgact

SEQ ID NO: 1279 - DNA, 21 bp, Artificial Sequence
  source: /note="Description of Artificial Sequence: Synthetic oligonucleotide"
actttggcggtgccttttaag

SEQ ID NO: 1280 - DNA, 21 bp, Artificial Sequence
  source: /note="Description of Artificial Sequence: Synthetic oligonucleotide"
agtgtgagtaagccttttttg

SEQ ID NO: 1281 - DNA, 21 bp, Artificial Sequence
  source: /note="Description of Artificial Sequence: Synthetic oligonucleotide"
tttacgttgacgacgcctaag

SEQ ID NO: 1282 - DNA, 21 bp, Artificial Sequence
  source: /note="Description of Artificial Sequence: Synthetic oligonucleotide"
atgaatgctacgaagaatgtg

SEQ ID NO: 1283 - DNA, 21 bp, Artificial Sequence
  source: /note="Description of Artificial Sequence: Synthetic oligonucleotide"
cagtcgtcgcagacgcctagg

SEQ ID NO: 1284 - DNA, 21 bp, Artificial Sequence
  source: /note="Description of Artificial Sequence: Synthetic oligonucleotide"
attctggggactggtacttcg

SEQ ID NO: 1285 - DNA, 21 bp, Artificial Sequence
  source: /note="Description of Artificial Sequence: Synthetic oligonucleotide"
acgcggactaatcctgaggct

SEQ ID NO: 1286 - DNA, 21 bp, Artificial Sequence
  source: /note="Description of Artificial Sequence: Synthetic oligonucleotide"
aatggggggactagtagttct

SEQ ID NO: 1287 - DNA, 21 bp, Artificial Sequence
  source: /note="Description of Artificial Sequence: Synthetic oligonucleotide"
tatactttgtcgcagggttgg

SEQ ID NO: 1288 - protein, 11 aa, Artificial Sequence
  source: /note="Description of Artificial Sequence: Synthetic peptide"
AQTLAVPFKAQ

SEQ ID NO: 1289 - protein, 11 aa, Artificial Sequence
  source: /note="Description of Artificial Sequence: Synthetic peptide"
AQSVSKPFLAQ

SEQ ID NO: 1290 - protein, 11 aa, Artificial Sequence
  source: /note="Description of Artificial Sequence: Synthetic peptide"
AQFTLTTPKAQ

SEQ ID NO: 1291 - protein, 11 aa, Artificial Sequence
  source: /note="Description of Artificial Sequence: Synthetic peptide"
DGTLAVPFKAQ

SEQ ID NO: 1292 - protein, 11 aa, Artificial Sequence
  source: /note="Description of Artificial Sequence: Synthetic peptide"
ESTLAVPFKAQ

SEQ ID NO: 1293 - protein, 11 aa, Artificial Sequence
  source: /note="Description of Artificial Sequence: Synthetic peptide"
GGTLAVPFKAQ

SEQ ID NO: 1294 - protein, 11 aa, Artificial Sequence
  source: /note="Description of Artificial Sequence: Synthetic peptide"
AQTLATPFKAQ

SEQ ID NO: 1295 - protein, 11 aa, Artificial Sequence
  source: /note="Description of Artificial Sequence: Synthetic peptide"
ATTLATPFKAQ

SEQ ID NO: 1296 - protein, 11 aa, Artificial Sequence
  source: /note="Description of Artificial Sequence: Synthetic peptide"
DGTLATPFKAQ

SEQ ID NO: 1297 - protein, 11 aa, Artificial Sequence
  source: /note="Description of Artificial Sequence: Synthetic peptide"
GGTLATPFKAQ

SEQ ID NO: 1298 - protein, 11 aa, Artificial Sequence
  source: /note="Description of Artificial Sequence: Synthetic peptide"
SGSLAVPFKAQ

SEQ ID NO: 1299 - protein, 11 aa, Artificial Sequence
  source: /note="Description of Artificial Sequence: Synthetic peptide"
AQTLAQPFKAQ

SEQ ID NO: 1300 - protein, 11 aa, Artificial Sequence
  source: /note="Description of Artificial Sequence: Synthetic peptide"
AQTLQQPFKAQ

SEQ ID NO: 1301 - protein, 11 aa, Artificial Sequence
  source: /note="Description of Artificial Sequence: Synthetic peptide"
AQTLSNPFKAQ

SEQ ID NO: 1302 - protein, 11 aa, Artificial Sequence
  source: /note="Description of Artificial Sequence: Synthetic peptide"
AQTLAVPFSNP

SEQ ID NO: 1303 - protein, 11 aa, Artificial Sequence
  source: /note="Description of Artificial Sequence: Synthetic peptide"
QGTLAVPFKAQ

SEQ ID NO: 1304 - protein, 11 aa, Artificial Sequence
  source: /note="Description of Artificial Sequence: Synthetic peptide"
NQTLAVPFKAQ

SEQ ID NO: 1305 - protein, 11 aa, Artificial Sequence
  source: /note="Description of Artificial Sequence: Synthetic peptide"
EGSLAVPFKAQ

SEQ ID NO: 1306 - protein, 11 aa, Artificial Sequence
  source: /note="Description of Artificial Sequence: Synthetic peptide"
SGNLAVPFKAQ

SEQ ID NO: 1307 - protein, 11 aa, Artificial Sequence
  source: /note="Description of Artificial Sequence: Synthetic peptide"
EGTLAVPFKAQ

SEQ ID NO: 1308 - protein, 11 aa, Artificial Sequence
  source: /note="Description of Artificial Sequence: Synthetic peptide"
DSTLAVPFKAQ

SEQ ID NO: 1309 - protein, 11 aa, Artificial Sequence
  source: /note="Description of Artificial Sequence: Synthetic peptide"
AVTLAVPFKAQ

SEQ ID NO: 1310 - protein, 11 aa, Artificial Sequence
  source: /note="Description of Artificial Sequence: Synthetic peptide"
AQTLSTPFKAQ

SEQ ID NO: 1311 - protein, 11 aa, Artificial Sequence
  source: /note="Description of Artificial Sequence: Synthetic peptide"
AQTLPQPFKAQ

SEQ ID NO: 1312 - protein, 11 aa, Artificial Sequence
  source: /note="Description of Artificial Sequence: Synthetic peptide"
AQTLSQPFKAQ

SEQ ID NO: 1313 - protein, 11 aa, Artificial Sequence
  source: /note="Description of Artificial Sequence: Synthetic peptide"
AQTLQLPFKAQ

SEQ ID NO: 1314 - protein, 11 aa, Artificial Sequence
  source: /note="Description of Artificial Sequence: Synthetic peptide"
AQTLTMPFKAQ

SEQ ID NO: 1315 - protein, 11 aa, Artificial Sequence
  source: /note="Description of Artificial Sequence: Synthetic peptide"
AQTLTTPFKAQ

SEQ ID NO: 1316 - protein, 11 aa, Artificial Sequence
  source: /note="Description of Artificial Sequence: Synthetic peptide"
AQYTLSQGWAQ

SEQ ID NO: 1317 - protein, 11 aa, Artificial Sequence
  source: /note="Description of Artificial Sequence: Synthetic peptide"
AQMNATKNVAQ

SEQ ID NO: 1318 - protein, 11 aa, Artificial Sequence
  source: /note="Description of Artificial Sequence: Synthetic peptide"
AQVSGGHHSAQ

SEQ ID NO: 1319 - protein, 11 aa, Artificial Sequence
  source: /note="Description of Artificial Sequence: Synthetic peptide"
AQTLTAPFKAQ

SEQ ID NO: 1320 - protein, 11 aa, Artificial Sequence
  source: /note="Description of Artificial Sequence: Synthetic peptide"
AQTLSKPFKAQ

SEQ ID NO: 1321 - protein, 7 aa, Artificial Sequence
  source: /note="Description of Artificial Sequence: Synthetic peptide"
QAVRTSL

SEQ ID NO: 1322 - protein, 7 aa, Artificial Sequence
  source: /note="Description of Artificial Sequence: Synthetic peptide"
LAKERLS

SEQ ID NO: 1323 - protein, 7 aa, Artificial Sequence
  source: /note="Description of Artificial Sequence: Synthetic peptide"
MNSTKNV

SEQ ID NO: 1324 - protein, 7 aa, Artificial Sequence
  source: /note="Description of Artificial Sequence: Synthetic peptide"
VSGGHHS

SEQ ID NO: 1325 - protein, 14 aa, Artificial Sequence
  source: /note="Description of Artificial Sequence: Synthetic peptide"
SAQTLAVPFKAQAQ

SEQ ID NO: 1326 - protein, 14 aa, Artificial Sequence
  source: /note="Description of Artificial Sequence: Synthetic peptide"
  MOD_RES (2)..(4): Any amino acid
SXXXLAVPFKAQAQ

SEQ ID NO: 1327 - protein, 14 aa, Artificial Sequence
  source: /note="Description of Artificial Sequence: Synthetic peptide"
  MOD_RES (4)..(6): Any amino acid
SAQXXXVPFKAQAQ

SEQ ID NO: 1328 - protein, 14 aa, Artificial Sequence
  source: /note="Description of Artificial Sequence: Synthetic peptide"
  MOD_RES (6)..(8): Any amino acid
SAQTLXXXFKAQAQ

SEQ ID NO: 1329 - protein, 14 aa, Artificial Sequence
  source: /note="Description of Artificial Sequence: Synthetic peptide"
  MOD_RES (8)..(10): Any amino acid
SAQTLAVXXXAQAQ

SEQ ID NO: 1330 - protein, 14 aa, Artificial Sequence
  source: /note="Description of Artificial Sequence: Synthetic peptide"
  MOD_RES (10)..(12): Any amino acid
SAQTLAVPFXXXAQ

SEQ ID NO: 1331 - protein, 7 aa, Artificial Sequence
  source: /note="Description of Artificial Sequence: Synthetic peptide"
TNHQSAQ

SEQ ID NO: 1332 - protein, 7 aa, Artificial Sequence
  source: /note="Description of Artificial Sequence: Synthetic peptide"
AQAQTGW

SEQ ID NO: 1333 - protein, 9 aa, Artificial Sequence
  source: /note="Description of Artificial Sequence: Synthetic peptide"
DGTLATPFK

SEQ ID NO: 1334 - protein, 11 aa, Artificial Sequence
  source: /note="Description of Artificial Sequence: Synthetic peptide"
  MOD_RES (10)..(11): Any amino acid
DGTLATPFKXX

SEQ ID NO: 1335 - protein, 8 aa, Artificial Sequence
  source: /note="Description of Artificial Sequence: Synthetic peptide"
LAVPFKAQ

SEQ ID NO: 1336 - protein, 6 aa, Artificial Sequence
  source: /note="Description of Artificial Sequence: Synthetic peptide"
VPFKAQ

SEQ ID NO: 1337 - protein, 4 aa, Artificial Sequence
  source: /note="Description of Artificial Sequence: Synthetic peptide"
FKAQ

SEQ ID NO: 1338 - protein, 6 aa, Artificial Sequence
  source: /note="Description of Artificial Sequence: Synthetic peptide"
AQTLAV

SEQ ID NO: 1339 - protein, 8 aa, Artificial Sequence
  source: /note="Description of Artificial Sequence: Synthetic peptide"
AQTLAVPF

SEQ ID NO: 1340 - protein, 4 aa, Artificial Sequence
  source: /note="Description of Artificial Sequence: Synthetic peptide"
QAVR

SEQ ID NO: 1341 - protein, 4 aa, Artificial Sequence
  source: /note="Description of Artificial Sequence: Synthetic peptide"
AVRT

SEQ ID NO: 1342 - protein, 4 aa, Artificial Sequence
  source: /note="Description of Artificial Sequence: Synthetic peptide"
VRTS

SEQ ID NO: 1343 - protein, 4 aa, Artificial Sequence
  source: /note="Description of Artificial Sequence: Synthetic peptide"
RTSL

SEQ ID NO: 1344 - protein, 5 aa, Artificial Sequence
  source: /note="Description of Artificial Sequence: Synthetic peptide"
QAVRT

SEQ ID NO: 1345 - protein, 5 aa, Artificial Sequence
  source: /note="Description of Artificial Sequence: Synthetic peptide"
AVRTS

SEQ ID NO: 1346 - protein, 5 aa, Artificial Sequence
  source: /note="Description of Artificial Sequence: Synthetic peptide"
VRTSL

SEQ ID NO: 1347 - protein, 6 aa, Artificial Sequence
  source: /note="Description of Artificial Sequence: Synthetic peptide"
QAVRTS

SEQ ID NO: 1348 - protein, 6 aa, Artificial Sequence
  source: /note="Description of Artificial Sequence: Synthetic peptide"
AVRTSL

SEQ ID NO: 1349 - DNA, 33 bp, Artificial Sequence
  source: /note="Description of Artificial Sequence: Synthetic oligonucleotide"
gatgggactttggcggtgccttttaaggcacag

SEQ ID NO: 1350 - DNA, 33 bp, Artificial Sequence
  source: /note="Description of Artificial Sequence: Synthetic oligonucleotide"
gatgggacgttggcggtgccttttaaggcacag

SEQ ID NO: 1351 - DNA, 21 bp, Artificial Sequence
  source: /note="Description of Artificial Sequence: Synthetic oligonucleotide"
caggcggttaggacgtctttg

SEQ ID NO: 1352 - DNA, 27 bp, Artificial Sequence
  source: /note="Description of Artificial Sequence: Synthetic oligonucleotide"
caggtcttcacggactcagactatcag

SEQ ID NO: 1353 - DNA, 32 bp, Artificial Sequence
  source: /note="Description of Artificial Sequence: Synthetic oligonucleotide"
caagtaaaacctctacaaatgtggtaaaatcg

SEQ ID NO: 1354 - DNA, 36 bp, Artificial Sequence
  source: /note="Description of Artificial Sequence: Synthetic oligonucleotide"
actcatcgaccaatacttgtactatctctctagaac

SEQ ID NO: 1355 - DNA, 26 bp, Artificial Sequence
  source: /note="Description of Artificial Sequence: Synthetic oligonucleotide"
ggaagtattccttggttttgaaccca

SEQ ID NO: 1356 - DNA, 23 bp, Artificial Sequence
  source: /note="Description of Artificial Sequence: Synthetic oligonucleotide"
ggtcgcggttcttgtttgtggat

SEQ ID NO: 1357 - DNA, 24 bp, Artificial Sequence
  source: /note="Description of Artificial Sequence: Synthetic oligonucleotide"
cgaccttgaagcgcatgaactcct

SEQ ID NO: 1358 - DNA, 83 bp, Artificial Sequence
  source: /note="Description of Artificial Sequence: Synthetic oligonucleotide"
  modified_base (42)..(43): a, c, t, or g
  modified_base (45)..(46): a, c, t, or g
  modified_base (48)..(49): a, c, t, or g
  modified_base (51)..(52): a, c, t, or g
  modified_base (54)..(55): a, c, t, or g
  modified_base (57)..(58): a, c, t, or g
  modified_base (60)..(61): a, c, t, or g
gtattccttggttttgaacccaaccggtctgcgcctgtgcmnnmnnmnnmnnmnnmnnmnnttgggcactctggtggtttgtc

SEQ ID NO: 1359 - DNA, 64 bp, Artificial Sequence
  source: /note="Description of Artificial Sequence: Synthetic oligonucleotide"
  modified_base (36)..(37): a, c, t, or g
  modified_base (39)..(40): a, c, t, or g
  modified_base (42)..(43): a, c, t, or g
gtattccttggttttgaacccaaccggtctgcgcmnnmnnmnnaaaaggcaccgccaaagtttg

SEQ ID NO: 1360 - DNA, 70 bp, Artificial Sequence
  source: /note="Description of Artificial Sequence: Synthetic oligonucleotide"
  modified_base (42)..(43): a, c, t, or g
  modified_base (45)..(46): a, c, t, or g
  modified_base (48)..(49): a, c, t, or g
gtattccttggttttgaacccaaccggtctgcgcctgtgcmnnmnnmnncaccgccaaagtttgggcact

SEQ ID NO: 1361 - DNA, 77 bp, Artificial Sequence
  source: /note="Description of Artificial Sequence: Synthetic oligonucleotide"
  modified_base (48)..(49): a, c, t, or g
  modified_base (51)..(52): a, c, t, or g
  modified_base (54)..(55): a, c, t, or g
gtattccttggttttgaacccaaccggtctgcgcctgtgccttaaamnnmnnmnncaaagtttgggcactctggtgg

SEQ ID NO: 1362 - DNA, 83 bp, Artificial Sequence
  source: /note="Description of Artificial Sequence: Synthetic oligonucleotide"
  modified_base (54)..(55): a, c, t, or g
  modified_base (57)..(58): a, c, t, or g
  modified_base (60)..(61): a, c, t, or g
gtattccttggttttgaacccaaccggtctgcgcctgtgccttaaaaggcacmnnmnnmnnttgggcactctggtggtttgtg

SEQ ID NO: 1363 - DNA, 21 bp, Artificial Sequence
  source: /note="Description of Artificial Sequence: Synthetic oligonucleotide"
cttgcgaaggagcggctttcg

SEQ ID NO: 1364 - protein, 10 aa, Artificial Sequence
  source: /note="Description of Artificial Sequence: Synthetic peptide"
VNLTWSRASG

SEQ ID NO: 1365 - protein, 14 aa, Artificial Sequence
  source: /note="Description of Artificial Sequence: Synthetic peptide"
EFCINHRGYWVCGD

SEQ ID NO: 1366 - protein, 11 aa, Artificial Sequence
  source: /note="Description of Artificial Sequence: Synthetic peptide"
EDGQVMDVDLS

SEQ ID NO: 1367 - protein, 9 aa, Artificial Sequence
  source: /note="Description of Artificial Sequence: Synthetic peptide"
EKQRNGTLT

SEQ ID NO: 1368 - protein, 17 aa, Artificial Sequence
  source: /note="Description of Artificial Sequence: Synthetic peptide"
TYQCRVTHPHLPRALMR

SEQ ID NO: 1369 - protein, 14 aa, Artificial Sequence
  source: /note="Description of Artificial Sequence: Synthetic peptide"
RHSTTQPRKTKGSG

SEQ ID NO: 1370 - protein, 13 aa, Artificial Sequence
  source: /note="Description of Artificial Sequence: Synthetic peptide"
DSNPRGVSAYLSR

SEQ ID NO: 1371 - protein, 12 aa, Artificial Sequence
  source: /note="Description of Artificial Sequence: Synthetic peptide"
TITCLWDLAPSK

SEQ ID NO: 1372 - protein, 10 aa, Artificial Sequence
  source: /note="Description of Artificial Sequence: Synthetic peptide"
KTKGSGFFVF

SEQ ID NO: 1373 - protein, 12 aa, Artificial Sequence
  source: /note="Description of Artificial Sequence: Synthetic peptide"
THPHLPRALMRS

SEQ ID NO: 1374 - protein, 23 aa, Artificial Sequence
  source: /note="Description of Artificial Sequence: Synthetic peptide"
GETYQCRVTHPHLPRALMRSTTK

SEQ ID NO: 1375 - protein, 8 aa, Artificial Sequence
  source: /note="Description of Artificial Sequence: Synthetic peptide"
LPRALMRS

SEQ ID NO: 1376 - protein, 8 aa, Artificial Sequence
  source: /note="Description of Artificial Sequence: Synthetic peptide"
INHRGYWV

SEQ ID NO: 1377 - protein, 12 aa, Artificial Sequence
  source: /note="Description of Artificial Sequence: Synthetic peptide"
CDAGSVRTNAPD

SEQ ID NO: 1378 - protein, 17 aa, Artificial Sequence
  source: /note="Description of Artificial Sequence: Synthetic peptide"
AKAVSNLTESRSESLQS

SEQ ID NO: 1379 - protein, 13 aa, Artificial Sequence
  source: /note="Description of Artificial Sequence: Synthetic peptide"
SLTGDEFKKVLET

SEQ ID NO: 1380 - protein, 11 aa, Artificial Sequence
  source: /note="Description of Artificial Sequence: Synthetic peptide"
REAVAYRFEED

SEQ ID NO: 1381 - protein, 10 aa, Artificial Sequence
  source: /note="Description of Artificial Sequence: Synthetic peptide"
INPEIITLDG

SEQ ID NO: 1382 - protein, 15 aa, Artificial Sequence
  source: /note="Description of Artificial Sequence: Synthetic peptide"
DISVTGAPVITATYL

SEQ ID NO: 1383 - protein, 12 aa, Artificial Sequence
  source: /note="Description of Artificial Sequence: Synthetic peptide"
DISVTGAPVITA

SEQ ID NO: 1384 - protein, 17 aa, Artificial Sequence
  source: /note="Description of Artificial Sequence: Synthetic peptide"
PKTVSNLTESSSESVQS

SEQ ID NO: 1385 - protein, 13 aa, Artificial Sequence
  source: /note="Description of Artificial Sequence: Synthetic peptide"
SLMGDEFKAVLET

SEQ ID NO: 1386 - protein, 11 aa, Artificial Sequence
  source: /note="Description of Artificial Sequence: Synthetic peptide"
QHSVAYTFEED

SEQ ID NO: 1387 - protein, 10 aa, Artificial Sequence
  source: /note="Description of Artificial Sequence: Synthetic peptide"
INPEIITRDG

SEQ ID NO: 1388 - protein, 15 aa, Artificial Sequence
  source: /note="Description of Artificial Sequence: Synthetic peptide"
DISLTGDPVITASYL

SEQ ID NO: 1389 - protein, 12 aa, Artificial Sequence
  source: /note="Description of Artificial Sequence: Synthetic peptide"
DISLTGDPVITA

SEQ ID NO: 1390 - protein, 11 aa, Artificial Sequence
  source: /note="Description of Artificial Sequence: Synthetic peptide"
DQSIDFEIDSA

SEQ ID NO: 1391 - protein, 20 aa, Artificial Sequence
  source: /note="Description of Artificial Sequence: Synthetic peptide"
KNVSEDLPLPTFSPTLLGDS

SEQ ID NO: 1392 - protein, 11 aa, Artificial Sequence
  source: /note="Description of Artificial Sequence: Synthetic peptide"
KNVSEDLPLPT

SEQ ID NO: 1393 - protein, 12 aa, Artificial Sequence
  source: /note="Description of Artificial Sequence: Synthetic peptide"
CDSGRVRTDAPD

SEQ ID NO: 1394 - protein, 14 aa, Artificial Sequence
  source: /note="Description of Artificial Sequence: Synthetic peptide"
FPEHLLVDFLQSLS

SEQ ID NO: 1395 - protein, 9 aa, Artificial Sequence
  source: /note="Description of Artificial Sequence: Synthetic peptide"
DAEFRHDSG

SEQ ID NO: 1396 - protein, 16 aa, Artificial Sequence
  source: /note="Description of Artificial Sequence: Synthetic peptide"
HYAAAQWDFGNTMCQL

SEQ ID NO: 1397 - protein, 13 aa, Artificial Sequence
  source: /note="Description of Artificial Sequence: Synthetic peptide"
YAAQWDFGNTMCQ

SEQ ID NO: 1398 - protein, 10 aa, Artificial Sequence
  source: /note="Description of Artificial Sequence: Synthetic peptide"
RSQKEGLHYT

SEQ ID NO: 1399 - protein, 19 aa, Artificial Sequence
  source: /note="Description of Artificial Sequence: Synthetic peptide"
SSRTPSDKPVAHWANPQAE

SEQ ID NO: 1400 - protein, 15 aa, Artificial Sequence
  source: /note="Description of Artificial Sequence: Synthetic peptide"
SRTPSDKPVAHWANP

SEQ ID NO: 1401 - protein, 9 aa, Artificial Sequence
  source: /note="Description of Artificial Sequence: Synthetic peptide"
SSRTPSDKP

SEQ ID NO: 1402 - protein, 14 aa, Artificial Sequence
  source: /note="Description of Artificial Sequence: Synthetic peptide"
NADGNVDYHMNSVP

SEQ ID NO: 1403 - protein, 11 aa, Artificial Sequence
  source: /note="Description of Artificial Sequence: Synthetic peptide"
DGNVDYHMNSV

SEQ ID NO: 1404 - protein, 16 aa, Artificial Sequence
  source: /note="Description of Artificial Sequence: Synthetic peptide"
RSFKEFLQSSLRALRQ

SEQ ID NO: 1405 - protein, 11 aa, Artificial Sequence
  source: /note="Description of Artificial Sequence: Synthetic peptide"
FKEFLQSSLRA

SEQ ID NO: 1406 - protein, 10 aa, Artificial Sequence
  source: /note="Description of Artificial Sequence: Synthetic peptide"
QMWAPQWGPD

SEQ ID NO: 1407 - protein, 6 aa, Artificial Sequence
  source: /note="Description of Artificial Sequence: Synthetic peptide"
RGNRQA

SEQ ID NO: 1408 - protein, 6 aa, Artificial Sequence
  source: /note="Description of Artificial Sequence: Synthetic peptide"
SSSTDP

SEQ ID NO: 1409 - protein, 6 aa, Artificial Sequence
  source: /note="Description of Artificial Sequence: Synthetic peptide"
SSNTAP

SEQ ID NO: 1410 - protein, 6 aa, Artificial Sequence
  source: /note="Description of Artificial Sequence: Synthetic peptide"
SNSNLP

SEQ ID NO: 1411 - protein, 6 aa, Artificial Sequence
  source: /note="Description of Artificial Sequence: Synthetic peptide"
SSTTAP

SEQ ID NO: 1412 - protein, 6 aa, Artificial Sequence
  source: /note="Description of Artificial Sequence: Synthetic peptide"
AANTAA

SEQ ID NO: 1413 - protein, 6 aa, Artificial Sequence
  source: /note="Description of Artificial Sequence: Synthetic peptide"
QQNTAP

SEQ ID NO: 1414 - protein, 6 aa, Artificial Sequence
  source: /note="Description of Artificial Sequence: Synthetic peptide"
SAQAQA

SEQ ID NO: 1415 - protein, 6 aa, Artificial Sequence
  source: /note="Description of Artificial Sequence: Synthetic peptide"
QANTGP

SEQ ID NO: 1416 - protein, 6 aa, Artificial Sequence
  source: /note="Description of Artificial Sequence: Synthetic peptide"
NATTAP

SEQ ID NO: 1417 - protein, 6 aa, Artificial Sequence
  source: /note="Description of Artificial Sequence: Synthetic peptide"
SSTAGP

SEQ ID NO: 1418 - protein, 6 aa, Artificial Sequence
  source: /note="Description of Artificial Sequence: Synthetic peptide"
QQNTAA

SEQ ID NO: 1419 - protein, 6 aa, Artificial Sequence
  source: /note="Description of Artificial Sequence: Synthetic peptide"
PSTAGP

SEQ ID NO: 1420 - protein, 6 aa, Artificial Sequence
  source: /note="Description of Artificial Sequence: Synthetic peptide"
NQNTAP

SEQ ID NO: 1421 - protein, 6 aa, Artificial Sequence
  source: /note="Description of Artificial Sequence: Synthetic peptide"
QAANAP

SEQ ID NO: 1422 - protein, 6 aa, Artificial Sequence
  source: /note="Description of Artificial Sequence: Synthetic peptide"
SIVGLP

SEQ ID NO: 1423 - protein, 6 aa, Artificial Sequence
  source: /note="Description of Artificial Sequence: Synthetic peptide"
AASTAA

SEQ ID NO: 1424 - protein, 6 aa, Artificial Sequence
  source: /note="Description of Artificial Sequence: Synthetic peptide"
SQNTTA

SEQ ID NO: 1425 - protein, 6 aa, Artificial Sequence
  source: /note="Description of Artificial Sequence: Synthetic peptide"
QQDTAP

SEQ ID NO: 1426 - protein, 6 aa, Artificial Sequence
  source: /note="Description of Artificial Sequence: Synthetic peptide"
QTNTGP

SEQ ID NO: 1427 - protein, 6 aa, Artificial Sequence
  source: /note="Description of Artificial Sequence: Synthetic peptide"
QTNGAP

SEQ ID NO: 1428 - protein, 6 aa, Artificial Sequence
  source: /note="Description of Artificial Sequence: Synthetic peptide"
QQNAAP

SEQ ID NO: 1429 - protein, 6 aa, Artificial Sequence
  source: /note="Description of Artificial Sequence: Synthetic peptide"
AANTQA

SEQ ID NO: 1430 - protein, 6 aa, Artificial Sequence
  source: /note="Description of Artificial Sequence: Synthetic peptide"
NGRAHA

SEQ ID NO: 1431 - protein, 7 aa, Artificial Sequence
  source: /note="Description of Artificial Sequence: Synthetic peptide"
QPEHSST

SEQ ID NO: 1432 - protein, 7 aa, Artificial Sequence
  source: /note="Description of Artificial Sequence: Synthetic peptide"
VNTANST

SEQ ID NO: 1433 - protein, 7 aa, Artificial Sequence
  source: /note="Description of Artificial Sequence: Synthetic peptide"
HGPMQKS

SEQ ID NO: 1434 - protein, 7 aa, Artificial Sequence
  source: /note="Description of Artificial Sequence: Synthetic peptide"
PHKPPLA

SEQ ID NO: 1435 - protein, 7 aa, Artificial Sequence
  source: /note="Description of Artificial Sequence: Synthetic peptide"
IKNNEMW

SEQ ID NO: 1436 - protein, 7 aa, Artificial Sequence
  source: /note="Description of Artificial Sequence: Synthetic peptide"
RNLDTPM

SEQ ID NO: 1437 - protein, 7 aa, Artificial Sequence
  source: /note="Description of Artificial Sequence: Synthetic peptide"
VDSHRQS

SEQ ID NO: 1438 - protein, 7 aa, Artificial Sequence
  source: /note="Description of Artificial Sequence: Synthetic peptide"
YDSKTKT

SEQ ID NO: 1439 - protein, 7 aa, Artificial Sequence
  source: /note="Description of Artificial Sequence: Synthetic peptide"
SQLPHQK

SEQ ID NO: 1440 - protein, 7 aa, Artificial Sequence
  source: /note="Description of Artificial Sequence: Synthetic peptide"
STMQQNT

SEQ ID NO: 1441 - protein, 7 aa, Artificial Sequence
  source: /note="Description of Artificial Sequence: Synthetic peptide"
TERYMTQ

SEQ ID NO: 1442 - protein, 7 aa, Artificial Sequence
  source: /note="Description of Artificial Sequence: Synthetic peptide"
DASLSTS

SEQ ID NO: 1443 - protein, 7 aa, Artificial Sequence
  source: /note="Description of Artificial Sequence: Synthetic peptide"
DLPNKKT

SEQ ID NO: 1444 - protein, 7 aa, Artificial Sequence
  source: /note="Description of Artificial Sequence: Synthetic peptide"
DLTAARL

SEQ ID NO: 1445 - protein, 7 aa, Artificial Sequence
  source: /note="Description of Artificial Sequence: Synthetic peptide"
EPHQFNY

SEQ ID NO: 1446 - protein, 7 aa, Artificial Sequence
  source: /note="Description of Artificial Sequence: Synthetic peptide"
EPQSNHT

SEQ ID NO: 1447 - protein, 7 aa, Artificial Sequence
  source: /note="Description of Artificial Sequence: Synthetic peptide"
MSSWPSQ

SEQ ID NO: 1448 - protein, 7 aa, Artificial Sequence
  source: /note="Description of Artificial Sequence: Synthetic peptide"
NPKHNAT

SEQ ID NO: 1449 - protein, 7 aa, Artificial Sequence
  source: /note="Description of Artificial Sequence: Synthetic peptide"
PDGMRTT

SEQ ID NO: 1450 - protein, 7 aa, Artificial Sequence
  source: /note="Description of Artificial Sequence: Synthetic peptide"
PNNNKTT

SEQ ID NO: 1451 - protein, 7 aa, Artificial Sequence
  source: /note="Description of Artificial Sequence: Synthetic peptide"
QSTTHDS

SEQ ID NO: 1452 - protein, 7 aa, Artificial Sequence
  source: /note="Description of Artificial Sequence: Synthetic peptide"
TGSKQKQ

SEQ ID NO: 1453 - protein, 7 aa, Artificial Sequence
  source: /note="Description of Artificial Sequence: Synthetic peptide"
SLKHQAL

SEQ ID NO: 1454 - protein, 7 aa, Artificial Sequence
  source: /note="Description of Artificial Sequence: Synthetic peptide"
SPIDGEQ

SEQ ID NO: 1455 - protein, 8 aa, Artificial Sequence
  source: /note="Description of Artificial Sequence: Synthetic peptide"
WIFPWIQL

SEQ ID NO: 1456 - protein, 9 aa, Artificial Sequence
  source: /note="Description of Artificial Sequence: Synthetic peptide"
CDCRGDCFC

SEQ ID NO: 1457 - protein, 5 aa, Artificial Sequence
  source: /note="Description of Artificial Sequence: Synthetic peptide"
CNGRC

SEQ ID NO: 1458 - protein, 7 aa, Artificial Sequence
  source: /note="Description of Artificial Sequence: Synthetic peptide"
CPRECES

SEQ ID NO: 1459 - protein, 10 aa, Artificial Sequence
  source: /note="Description of Artificial Sequence: Synthetic peptide"
CTTHWGFTLC

SEQ ID NO: 1460 - protein, 9 aa, Artificial Sequence
  source: /note="Description of Artificial Sequence: Synthetic peptide"
CGRRAGGSC

SEQ ID NO: 1461 - protein, 9 aa, Artificial Sequence
  source: /note="Description of Artificial Sequence: Synthetic peptide"
CKGGRAKDC

SEQ ID NO: 1462 - protein, 9 aa, Artificial Sequence
  source: /note="Description of Artificial Sequence: Synthetic peptide"
CVPELGHEC

SEQ ID NO: 1463 - protein, 9 aa, Artificial Sequence
  source: /note="Description of Artificial Sequence: Synthetic peptide"
CRRETAWAK

SEQ ID NO: 1464 - protein, 14 aa, Artificial Sequence
  source: /note="Description of Artificial Sequence: Synthetic peptide"
VSWFSHRYSPFAVS

SEQ ID NO: 1465 - protein, 13 aa, Artificial Sequence
  source: /note="Description of Artificial Sequence: Synthetic peptide"
GYRDGYAGPILYN

SEQ ID NO: 1466 - protein, 7 aa, Artificial Sequence
  source: /note="Description of Artificial Sequence: Synthetic peptide"
  MOD_RES (1)..(3): Any amino acid
  MOD_RES (5)..(7): Any amino acid
XXXYXXX

SEQ ID NO: 1467 - protein, 4 aa, Artificial Sequence
  source: /note="Description of Artificial Sequence: Synthetic peptide"
  VARIANT (2)..(2): /replace="Met"
  SITE (1)..(4): /note="Variant residues given in the sequence have no preference with respect to those in the annotations for variant positions"
YENW

SEQ ID NO: 1468 - protein, 7 aa, Artificial Sequence
  source: /note="Description of Artificial Sequence: Synthetic peptide"
RPLPPLP

SEQ ID NO: 1469 - protein, 7 aa, Artificial Sequence
  source: /note="Description of Artificial Sequence: Synthetic peptide"
APPLPPR

SEQ ID NO: 1470 - protein, 12 aa, Artificial Sequence
  source: /note="Description of Artificial Sequence: Synthetic peptide"
DVFYPYPYASGS

SEQ ID NO: 1471 - protein, 6 aa, Artificial Sequence
  source: /note="Description of Artificial Sequence: Synthetic peptide"
MYWYPY

SEQ ID NO: 1472 - protein, 12 aa, Artificial Sequence
  source: /note="Description of Artificial Sequence: Synthetic peptide"
DITWDQLWDLMK

SEQ ID NO: 1473 - protein, 8 aa, Artificial Sequence
  source: /note="Description of Artificial Sequence: Synthetic peptide"
  VARIANT (5)..(5): /replace="Leu
  SITE (1)..(8): /note="Variant residues given in the sequence have no preference with respect to those in the annotations for variant positions"
CWDDGWLC

SEQ ID NO: 1474 - protein, 14 aa, Artificial Sequence
  source: /note="Description of Artificial Sequence: Synthetic peptide"
EWCEYLGGYLRCYA

SEQ ID NO: 1475 - protein, 14 aa, Artificial Sequence
  source: /note="Description of Artificial Sequence: Synthetic peptide"
  MOD_RES (2)..(2): Any amino acid
  MOD_RES (4)..(5): Any amino acid
  MOD_RES (8)..(8): Any amino acid
  MOD_RES (11)..(11): Any amino acid
  MOD_RES (13)..(13): Any amino acid
YXCXXGPXTWXCXP

SEQ ID NO: 1476 - protein, 14 aa, Artificial Sequence
  source: /note="Description of Artificial Sequence: Synthetic peptide"
IEGPTLRQWLAARA

SEQ ID NO: 1477 - protein, 5 aa, Artificial Sequence
  source: /note="Description of Artificial Sequence: Synthetic peptide"
  MOD_RES (3)..(4): Any amino acid
  VARIANT (5)..(5): /replace="Trp" or "Phe" or "His
  SITE (1)..(5): /note="Variant residues given in the sequence have no preference with respect to those in the annotations for variant positions"
LWXXY

SEQ ID NO: 1478 - protein, 7 aa, Artificial Sequence
  source: /note="Description of Artificial Sequence: Synthetic peptide"
  MOD_RES (1)..(1): Any amino acid
  MOD_RES (3)..(4): Any amino acid
XFXXYLW

SEQ ID NO: 1479 - protein, 13 aa, Artificial Sequence
  source: /note="Description of Artificial Sequence: Synthetic peptide"
SSIISHFRWGLCD

SEQ ID NO: 1480 - protein, 13 aa, Artificial Sequence
  source: /note="Description of Artificial Sequence: Synthetic peptide"
MSRPACPPNDKYE

SEQ ID NO: 1481 - protein, 8 aa, Artificial Sequence
  source: /note="Description of Artificial Sequence: Synthetic peptide"
CLRSGRGC

SEQ ID NO: 1482 - protein, 9 aa, Artificial Sequence
  source: /note="Description of Artificial Sequence: Synthetic peptide"
CHWMFSPWC

SEQ ID NO: 1483 - protein, 4 aa, Artificial Sequence
  source: /note="Description of Artificial Sequence: Synthetic peptide"
  MOD_RES (2)..(3): Any amino acid
WXXF

SEQ ID NO: 1484 - protein, 8 aa, Artificial Sequence
  source: /note="Description of Artificial Sequence: Synthetic peptide"
CSSRLDAC

SEQ ID NO: 1485 - protein, 7 aa, Artificial Sequence
  source: /note="Description of Artificial Sequence: Synthetic peptide"
CLPVASC

SEQ ID NO: 1486 - protein, 13 aa, Artificial Sequence
  source: /note="Description of Artificial Sequence: Synthetic peptide"
CGFECVRQCPERC

SEQ ID NO: 1487 - protein, 13 aa, Artificial Sequence
  source: /note="Description of Artificial Sequence: Synthetic peptide"
CVALCREACGEGC

SEQ ID NO: 1488 - protein, 9 aa, Artificial Sequence
  source: /note="Description of Artificial Sequence: Synthetic peptide"
SWCEPGWCR

SEQ ID NO: 1489 - protein, 7 aa, Artificial Sequence
  source: /note="Description of Artificial Sequence: Synthetic peptide"
YSGKWGW

SEQ ID NO: 1490 - protein, 7 aa, Artificial Sequence
  source: /note="Description of Artificial Sequence: Synthetic peptide"
GLSGGRS

SEQ ID NO: 1491 - protein, 7 aa, Artificial Sequence
  source: /note="Description of Artificial Sequence: Synthetic peptide"
LMLPRAD

SEQ ID NO: 1492 - protein, 9 aa, Artificial Sequence
  source: /note="Description of Artificial Sequence: Synthetic peptide"
CSCFRDVCC

SEQ ID NO: 1493 - protein, 9 aa, Artificial Sequence
  source: /note="Description of Artificial Sequence: Synthetic peptide"
CRDVVSVIC

SEQ ID NO: 1494 - protein, 6 aa, Artificial Sequence
  source: /note="Description of Artificial Sequence: Synthetic peptide"
MARSGL

SEQ ID NO: 1495 - protein, 6 aa, Artificial Sequence
  source: /note="Description of Artificial Sequence: Synthetic peptide"
MARAKE

SEQ ID NO: 1496 - protein, 6 aa, Artificial Sequence
  source: /note="Description of Artificial Sequence: Synthetic peptide"
MSRTMS

SEQ ID NO: 1497 - protein, 6 aa, Artificial Sequence
  source: /note="Description of Artificial Sequence: Synthetic peptide"
KCCYSL

SEQ ID NO: 1498 - protein, 14 aa, Artificial Sequence
  source: /note="Description of Artificial Sequence: Synthetic peptide"
MYWGDSHWLQYWYE

SEQ ID NO: 1499 - protein, 7 aa, Artificial Sequence
  source: /note="Description of Artificial Sequence: Synthetic peptide"
MQLPLAT

SEQ ID NO: 1500 - protein, 4 aa, Artificial Sequence
  source: /note="Description of Artificial Sequence: Synthetic peptide"
EWLS

SEQ ID NO: 1501 - protein, 4 aa, Artificial Sequence
  source: /note="Description of Artificial Sequence: Synthetic peptide"
SNEW

SEQ ID NO: 1502 - protein, 4 aa, Artificial Sequence
  source: /note="Description of Artificial Sequence: Synthetic peptide"
TNYL

SEQ ID NO: 1503 - protein, 12 aa, Artificial Sequence
  source: /note="Description of Artificial Sequence: Synthetic peptide"
WDLAWMFRLPVG

SEQ ID NO: 1504 - protein, 13 aa, Artificial Sequence
  source: /note="Description of Artificial Sequence: Synthetic peptide"
CTVALPGGYVRVC

SEQ ID NO: 1505 - protein, 13 aa, Artificial Sequence
  source: /note="Description of Artificial Sequence: Synthetic peptide"
CVAYCIEHHCWTC

SEQ ID NO: 1506 - protein, 12 aa, Artificial Sequence
  source: /note="Description of Artificial Sequence: Synthetic peptide"
CVFAHNYDYLVC

SEQ ID NO: 1507 - protein, 10 aa, Artificial Sequence
  source: /note="Description of Artificial Sequence: Synthetic peptide"
CVFTSNYAFC

SEQ ID NO: 1508 - protein, 7 aa, Artificial Sequence
  source: /note="Description of Artificial Sequence: Synthetic peptide"
VHSPNKK

SEQ ID NO: 1509 - protein, 7 aa, Artificial Sequence
  source: /note="Description of Artificial Sequence: Synthetic peptide"
CRGDGWC

SEQ ID NO: 1510 - protein, 6 aa, Artificial Sequence
  source: /note="Description of Artificial Sequence: Synthetic peptide"
  MOD_RES (1)..(1): Any amino acid
  MOD_RES (6)..(6): Any amino acid
XRGCDX

SEQ ID NO: 1511 - protein, 4 aa, Artificial Sequence
  source: /note="Description of Artificial Sequence: Synthetic peptide"
  MOD_RES (2)..(3): Any amino acid
  VARIANT (4)..(4): /replace="Thr
  SITE (1)..(4): /note="Variant residues given in the sequence have no preference with respect to those in the annotations for variant positions"
PXXS

SEQ ID NO: 1512 - protein, 11 aa, Artificial Sequence
  source: /note="Description of Artificial Sequence: Synthetic peptide"
SGKGPRQITAL

SEQ ID NO: 1513 - protein, 14 aa, Artificial Sequence
  source: /note="Description of Artificial Sequence: Synthetic peptide"
  VARIANT (10)..(10): /replace="Gln"
  VARIANT (11)..(11): /replace="Ala"
  VARIANT (12)..(12): /replace="Tyr"
  VARIANT (13)..(13): /replace="Val" or "Met" or "Arg"
  VARIANT (14)..(14): /replace="Lys
  SITE (1)..(14): /note="Variant residues given in the sequence have no preference with respect to those in the annotations for variant positions"
AAAAAAAAAANLTR

SEQ ID NO: 1514 - protein, 6 aa, Artificial Sequence
  source: /note="Description of Artificial Sequence: Synthetic peptide"
VYMSPF

SEQ ID NO: 1515 - protein, 7 aa, Artificial Sequence
  source: /note="Description of Artificial Sequence: Synthetic peptide"
ATWLPPR

SEQ ID NO: 1516 - protein, 12 aa, Artificial Sequence
  source: /note="Description of Artificial Sequence: Synthetic peptide"
HTMYYHHYQHHL

SEQ ID NO: 1517 - protein, 19 aa, Artificial Sequence
  source: /note="Description of Artificial Sequence: Synthetic peptide"
SEVGCRAGPLQWLCEKYFG

SEQ ID NO: 1518 - protein, 18 aa, Artificial Sequence
  source: /note="Description of Artificial Sequence: Synthetic peptide"
CGLLPVGRPDRNVWRWLC

SEQ ID NO: 1519 - protein, 15 aa, Artificial Sequence
  source: /note="Description of Artificial Sequence: Synthetic peptide"
CKGQCDRFKGLPWEC

SEQ ID NO: 1520 - protein, 5 aa, Artificial Sequence
  source: /note="Description of Artificial Sequence: Synthetic peptide"
SGRSA

SEQ ID NO: 1521 - protein, 4 aa, Artificial Sequence
  source: /note="Description of Artificial Sequence: Synthetic peptide"
WGFP

SEQ ID NO: 1522 - protein, 17 aa, Artificial Sequence
  source: /note="Description of Artificial Sequence: Synthetic peptide"
AEPMPHSLNFSQYLWYT

SEQ ID NO: 1523 - protein, 6 aa, Artificial Sequence
  source: /note="Description of Artificial Sequence: Synthetic peptide"
  VARIANT (4)..(4): /replace="Phe
  SITE (1)..(6): /note="Variant residues given in the sequence have no preference with respect to those in the annotations for variant positions"
WAYWSP

SEQ ID NO: 1524 - protein, 7 aa, Artificial Sequence
  source: /note="Description of Artificial Sequence: Synthetic peptide"
IELLQAR

SEQ ID NO: 1525 - protein, 16 aa, Artificial Sequence
  source: /note="Description of Artificial Sequence: Synthetic peptide"
AYTKCSRQWRTCMTTH

SEQ ID NO: 1526 - protein, 15 aa, Artificial Sequence
  source: /note="Description of Artificial Sequence: Synthetic peptide"
PQNSKIPGPTFLDPH

SEQ ID NO: 1527 - protein, 15 aa, Artificial Sequence
  source: /note="Description of Artificial Sequence: Synthetic peptide"
SMEPALPDWWWKMFK

SEQ ID NO: 1528 - protein, 16 aa, Artificial Sequence
  source: /note="Description of Artificial Sequence: Synthetic peptide"
ANTPCGPYTHDCPVKR

SEQ ID NO: 1529 - protein, 12 aa, Artificial Sequence
  source: /note="Description of Artificial Sequence: Synthetic peptide"
TACHQHVRMVRP

SEQ ID NO: 1530 - protein, 12 aa, Artificial Sequence
  source: /note="Description of Artificial Sequence: Synthetic peptide"
VPWMEPAYQRFL

SEQ ID NO: 1531 - protein, 8 aa, Artificial Sequence
  source: /note="Description of Artificial Sequence: Synthetic peptide"
DPRATPGS

SEQ ID NO: 1532 - protein, 12 aa, Artificial Sequence
  source: /note="Description of Artificial Sequence: Synthetic peptide"
FRPNRAQDYNTN

SEQ ID NO: 1533 - protein, 9 aa, Artificial Sequence
  source: /note="Description of Artificial Sequence: Synthetic peptide"
CTKNSYLMC

SEQ ID NO: 1534 - protein, 11 aa, Artificial Sequence
  source: /note="Description of Artificial Sequence: Synthetic peptide"
  VARIANT (2)..(2): /replace="Arg"
  VARIANT (3)..(3): /replace="Arg"
  VARIANT (5)..(5): /replace="Asn"
  MOD_RES (6)..(7): Any amino acid
  VARIANT (9)..(9): /replace="Val
  SITE (1)..(11): /note="Variant residues given in the sequence have no preference with respect to those in the annotations for variant positions"
CQLTGXXGAGC

SEQ ID NO: 1535 - protein, 9 aa, Artificial Sequence
  source: /note="Description of Artificial Sequence: Synthetic peptide"
CPIEDRPMC

SEQ ID NO: 1536 - protein, 12 aa, Artificial Sequence
  source: /note="Description of Artificial Sequence: Synthetic peptide"
HEWSYLAPYPWF

SEQ ID NO: 1537 - protein, 9 aa, Artificial Sequence
  source: /note="Description of Artificial Sequence: Synthetic peptide"
MCPKHPLGC

SEQ ID NO: 1538 - protein, 15 aa, Artificial Sequence
  source: /note="Description of Artificial Sequence: Synthetic peptide"
RMWPSSTVNLSAGRR

SEQ ID NO: 1539 - protein, 20 aa, Artificial Sequence
  source: /note="Description of Artificial Sequence: Synthetic peptide"
SAKTAVSQRVWLPSHRGGEP

SEQ ID NO: 1540 - protein, 20 aa, Artificial Sequence
  source: /note="Description of Artificial Sequence: Synthetic peptide"
KSREHVNNSACPSKRITAAL

SEQ ID NO: 1541 - protein, 4 aa, Artificial Sequence
  source: /note="Description of Artificial Sequence: Synthetic peptide"
EGFR

SEQ ID NO: 1542 - protein, 6 aa, Artificial Sequence
  source: /note="Description of Artificial Sequence: Synthetic peptide"
AGLGVR

SEQ ID NO: 1543 - protein, 15 aa, Artificial Sequence
  source: /note="Description of Artificial Sequence: Synthetic peptide"
GTRQGHTMRLGVSDG

SEQ ID NO: 1544 - protein, 15 aa, Artificial Sequence
  source: /note="Description of Artificial Sequence: Synthetic peptide"
IAGLATPGWSHWLAL

SEQ ID NO: 1545 - protein, 7 aa, Artificial Sequence
  source: /note="Description of Artificial Sequence: Synthetic peptide"
SMSIARL

SEQ ID NO: 1546 - protein, 7 aa, Artificial Sequence
  source: /note="Description of Artificial Sequence: Synthetic peptide"
HTFEPGV

SEQ ID NO: 1547 - protein, 15 aa, Artificial Sequence
  source: /note="Description of Artificial Sequence: Synthetic peptide"
NTSLKRISNKRIRRK

SEQ ID NO: 1548 - protein, 15 aa, Artificial Sequence
  source: /note="Description of Artificial Sequence: Synthetic peptide"
LRIKRKRRKRKKTRK

SEQ ID NO: 1549 - DNA, 21 bp, Adeno-associated virus 2
agcvvmdcaggarscascaac

SEQ ID NO: 1550 - protein, 7 aa, Artificial Sequence
  source: /note="Description of Artificial Sequence: Synthetic peptide"
SDSGASN

SEQ ID NO: 1551 - protein, 7 aa, Artificial Sequence
  source: /note="Description of Artificial Sequence: Synthetic peptide"
SPSGASN

SEQ ID NO: 1552 - protein, 7 aa, Artificial Sequence
  source: /note="Description of Artificial Sequence: Synthetic peptide"
SHSGASN

SEQ ID NO: 1553 - protein, 7 aa, Artificial Sequence
  source: /note="Description of Artificial Sequence: Synthetic peptide"
SRSGASN

SEQ ID NO: 1554 - protein, 7 aa, Artificial Sequence
  source: /note="Description of Artificial Sequence: Synthetic peptide"
SKSGASN

SEQ ID NO: 1555 - protein, 7 aa, Artificial Sequence
  source: /note="Description of Artificial Sequence: Synthetic peptide"
SNSGASN

SEQ ID NO: 1556 - protein, 7 aa, Artificial Sequence
  source: /note="Description of Artificial Sequence: Synthetic peptide"
SGSGASN

SEQ ID NO: 1557 - protein, 7 aa, Artificial Sequence
  source: /note="Description of Artificial Sequence: Synthetic peptide"
SASGASN

SEQ ID NO: 1558 - protein, 7 aa, Artificial Sequence
  source: /note="Description of Artificial Sequence: Synthetic peptide"
SESGTSN

SEQ ID NO: 1559 - protein, 7 aa, Artificial Sequence
  source: /note="Description of Artificial Sequence: Synthetic peptide"
STTGGSN

SEQ ID NO: 1560 - protein, 7 aa, Artificial Sequence
  source: /note="Description of Artificial Sequence: Synthetic peptide"
SSAGSTN

SEQ ID NO: 1561 - protein, 6 aa, Artificial Sequence
  source: /note="Description of Artificial Sequence: Synthetic peptide"
NNDSQA

SEQ ID NO: 1562 - protein, 6 aa, Artificial Sequence
  source: /note="Description of Artificial Sequence: Synthetic peptide"
NNRNQA

SEQ ID NO: 1563 - protein, 6 aa, Artificial Sequence
  source: /note="Description of Artificial Sequence: Synthetic peptide"
NNNKQA

SEQ ID NO: 1564 - protein, 6 aa, Artificial Sequence
  source: /note="Description of Artificial Sequence: Synthetic peptide"
NAKRQA

SEQ ID NO: 1565 - protein, 6 aa, Artificial Sequence
  source: /note="Description of Artificial Sequence: Synthetic peptide"
NDEHQA

SEQ ID NO: 1566 - protein, 6 aa, Artificial Sequence
  source: /note="Description of Artificial Sequence: Synthetic peptide"
NTSQKA

SEQ ID NO: 1567 - protein, 25 aa, Artificial Sequence
  source: /note="Description of Artificial Sequence: Synthetic peptide"
YYLSRTNTPSGTDTQSRLVFSQAGA

SEQ ID NO: 1568 - protein, 25 aa, Artificial Sequence
  source: /note="Description of Artificial Sequence: Synthetic peptide"
YYLSRTNTDSGTETQSGLDFSQAGA

SEQ ID NO: 1569 - protein, 25 aa, Artificial Sequence
  source: /note="Description of Artificial Sequence: Synthetic peptide"
YYLSRTNTESGTPTQSALEFSQAGA

SEQ ID NO: 1570 - protein, 25 aa, Artificial Sequence
  source: /note="Description of Artificial Sequence: Synthetic peptide"
YYLSRTNTHSGTHTQSPLHFSQAGA

SEQ ID NO: 1571 - protein, 25 aa, Artificial Sequence
  source: /note="Description of Artificial Sequence: Synthetic peptide"
YYLSRTNTSSGTITISHLIFSQAGA

SEQ ID NO: 1572 - protein, 25 aa, Artificial Sequence
  source: /note="Description of Artificial Sequence: Synthetic peptide"
YYLSRTNTRSGIMTKSSLMFSQAGA

SEQ ID NO: 1573 - protein, 25 aa, Artificial Sequence
  source: /note="Description of Artificial Sequence: Synthetic peptide"
YYLSRTNTKSGRKTLSNLSFSQAGA

SEQ ID NO: 1574 - protein, 25 aa, Artificial Sequence
  source: /note="Description of Artificial Sequence: Synthetic peptide"
YYLSRTNDGSGPVTPSKLRFSQRGA

SEQ ID NO: 1575 - protein, 25 aa, Artificial Sequence
  source: /note="Description of Artificial Sequence: Synthetic peptide"
YYLSRTNAASGHATHSDLKFSQPGA

SEQ ID NO: 1576 - protein, 25 aa, Artificial Sequence
  source: /note="Description of Artificial Sequence: Synthetic peptide"
YYLSRTNGQAGSLTMSELGFSQVGA

SEQ ID NO: 1577 - protein, 25 aa, Artificial Sequence
  source: /note="Description of Artificial Sequence: Synthetic peptide"
YYLSRTNSTGGNQTTSQLLFSQLSA

SEQ ID NO: 1578 - protein, 25 aa, Artificial Sequence
  source: /note="Description of Artificial Sequence: Synthetic peptide"
YFLSRTNNNTGLNTNSTLNFSQGRA

SEQ ID NO: 1579 - protein, 16 aa, Artificial Sequence
  source: /note="Description of Artificial Sequence: Synthetic peptide"
SKTGADNNNSEYSWTG

SEQ ID NO: 1580 - protein, 16 aa, Artificial Sequence
  source: /note="Description of Artificial Sequence: Synthetic peptide"
SKTDADNNNSEYSWTG

SEQ ID NO: 1581 - protein, 16 aa, Artificial Sequence
  source: /note="Description of Artificial Sequence: Synthetic peptide"
SKTEADNNNSEYSWTG

SEQ ID NO: 1582 - protein, 16 aa, Artificial Sequence
  source: /note="Description of Artificial Sequence: Synthetic peptide"
SKTPADNNNSEYSWTG

SEQ ID NO: 1583 - protein, 16 aa, Artificial Sequence
  source: /note="Description of Artificial Sequence: Synthetic peptide"
SKTHADNNNSEYSWTG

SEQ ID NO: 1584 - protein, 16 aa, Artificial Sequence
  source: /note="Description of Artificial Sequence: Synthetic peptide"
SKTQADNNNSEYSWTG

SEQ ID NO: 1585 - protein, 16 aa, Artificial Sequence
  source: /note="Description of Artificial Sequence: Synthetic peptide"
SKTIADNNNSEYSWTG

SEQ ID NO: 1586 - protein, 16 aa, Artificial Sequence
  source: /note="Description of Artificial Sequence: Synthetic peptide"
SKTMADNNNSEYSWTG

SEQ ID NO: 1587 - protein, 16 aa, Artificial Sequence
  source: /note="Description of Artificial Sequence: Synthetic peptide"
SKTRADNNNSEYSWTG

SEQ ID NO: 1588 - protein, 16 aa, Artificial Sequence
  source: /note="Description of Artificial Sequence: Synthetic peptide"
SKTNADNNNSEYSWTG

SEQ ID NO: 1589 - protein, 16 aa, Artificial Sequence
  source: /note="Description of Artificial Sequence: Synthetic peptide"
SKTVGRNNNSEYSWTG

SEQ ID NO: 1590 - protein, 16 aa, Artificial Sequence
  source: /note="Description of Artificial Sequence: Synthetic peptide"
SKTADRNNNSEYSWTG

SEQ ID NO: 1591 - protein, 16 aa, Artificial Sequence
  source: /note="Description of Artificial Sequence: Synthetic peptide"
SKKLSQNNNSKYSWQG

SEQ ID NO: 1592 - protein, 16 aa, Artificial Sequence
  source: /note="Description of Artificial Sequence: Synthetic peptide"
SKPTTGNNNSDYSWPG

SEQ ID NO: 1593 - protein, 16 aa, Artificial Sequence
  source: /note="Description of Artificial Sequence: Synthetic peptide"
STQKNENNNSNYSWPG

SEQ ID NO: 1594 - protein, 8 aa, Artificial Sequence
  source: /note="Description of Artificial Sequence: Synthetic peptide"
HKDDEGKF

SEQ ID NO: 1595 - protein, 8 aa, Artificial Sequence
  source: /note="Description of Artificial Sequence: Synthetic peptide"
HKDDNRKF

SEQ ID NO: 1596 - protein, 8 aa, Artificial Sequence
  source: /note="Description of Artificial Sequence: Synthetic peptide"
HKDDTNKF

SEQ ID NO: 1597 - protein, 8 aa, Artificial Sequence
  source: /note="Description of Artificial Sequence: Synthetic peptide"
HEDSDKNF

SEQ ID NO: 1598 - protein, 8 aa, Artificial Sequence
  source: /note="Description of Artificial Sequence: Synthetic peptide"
HRDGADSF

SEQ ID NO: 1599 - protein, 8 aa, Artificial Sequence
  source: /note="Description of Artificial Sequence: Synthetic peptide"
HGDNKSRF

SEQ ID NO: 1600 - protein, 14 aa, Artificial Sequence
  source: /note="Description of Artificial Sequence: Synthetic peptide"
KQGSEKTNVDFEEV

SEQ ID NO: 1601 - protein, 14 aa, Artificial Sequence
  source: /note="Description of Artificial Sequence: Synthetic peptide"
KQGSEKTNVDSEEV

SEQ ID NO: 1602 - protein, 14 aa, Artificial Sequence
  source: /note="Description of Artificial Sequence: Synthetic peptide"
KQGSEKTNVDVEEV

SEQ ID NO: 1603 - protein, 14 aa, Artificial Sequence
  source: /note="Description of Artificial Sequence: Synthetic peptide"
KQGSDKTNVDDAGV

SEQ ID NO: 1604 - protein, 14 aa, Artificial Sequence
  source: /note="Description of Artificial Sequence: Synthetic peptide"
KQGSSKTNVDPREV

SEQ ID NO: 1605 - protein, 14 aa, Artificial Sequence
  source: /note="Description of Artificial Sequence: Synthetic peptide"
KQGSRKTNVDHKQV

SEQ ID NO: 1606 - protein, 14 aa, Artificial Sequence
  source: /note="Description of Artificial Sequence: Synthetic peptide"
KQGSKGGNVDTNRV

SEQ ID NO: 1607 - protein, 14 aa, Artificial Sequence
  source: /note="Description of Artificial Sequence: Synthetic peptide"
KQGSGEANVDNGDV

SEQ ID NO: 1608 - protein, 14 aa, Artificial Sequence
  source: /note="Description of Artificial Sequence: Synthetic peptide"
KQDAAADNIDYDHV

SEQ ID NO: 1609 - protein, 14 aa, Artificial Sequence
  source: /note="Description of Artificial Sequence: Synthetic peptide"
KQSGTRSNAAASSV

SEQ ID NO: 1610 - protein, 14 aa, Artificial Sequence
  source: /note="Description of Artificial Sequence: Synthetic peptide"
KENTNTNDTELTNV

SEQ ID NO: 1611 - protein, 14 aa, Artificial Sequence
  source: /note="Description of Artificial Sequence: Synthetic peptide"
QRGNNVAATADVNT

SEQ ID NO: 1612 - protein, 14 aa, Artificial Sequence
  source: /note="Description of Artificial Sequence: Synthetic peptide"
QRGNNEAATADVNT

SEQ ID NO: 1613 - protein, 14 aa, Artificial Sequence
  source: /note="Description of Artificial Sequence: Synthetic peptide"
QRGNNPAATADVNT

SEQ ID NO: 1614 - protein, 14 aa, Artificial Sequence
  source: /note="Description of Artificial Sequence: Synthetic peptide"
QRGNNHAATADVNT

SEQ ID NO: 1615 - protein, 14 aa, Artificial Sequence
  source: /note="Description of Artificial Sequence: Synthetic peptide"
QEENNIAATPGVNT

SEQ ID NO: 1616 - protein, 14 aa, Artificial Sequence
  source: /note="Description of Artificial Sequence: Synthetic peptide"
QPPNNMAATHEVNT

SEQ ID NO: 1617 - protein, 14 aa, Artificial Sequence
  source: /note="Description of Artificial Sequence: Synthetic peptide"
QHHNNSAATTIVNT

SEQ ID NO: 1618 - protein, 14 aa, Artificial Sequence
  source: /note="Description of Artificial Sequence: Synthetic peptide"
QTTNNRAAFNMVET

SEQ ID NO: 1619 - protein, 14 aa, Artificial Sequence
  source: /note="Description of Artificial Sequence: Synthetic peptide"
QKKNNNAASKKVAT

SEQ ID NO: 1620 - protein, 14 aa, Artificial Sequence
  source: /note="Description of Artificial Sequence: Synthetic peptide"
QGGNNKAADDAVKT

SEQ ID NO: 1621 - protein, 14 aa, Artificial Sequence
  source: /note="Description of Artificial Sequence: Synthetic peptide"
QAAKGGAADDAVKT

SEQ ID NO: 1622 - protein, 14 aa, Artificial Sequence
  source: /note="Description of Artificial Sequence: Synthetic peptide"
QDDRAAAANESVDT

SEQ ID NO: 1623 - protein, 14 aa, Artificial Sequence
  source: /note="Description of Artificial Sequence: Synthetic peptide"
QQQHDDAAYQRVHT

SEQ ID NO: 1624 - protein, 14 aa, Artificial Sequence
  source: /note="Description of Artificial Sequence: Synthetic peptide"
QSSSSLAAVSTVQT

SEQ ID NO: 1625 - protein, 14 aa, Artificial Sequence
  source: /note="Description of Artificial Sequence: Synthetic peptide"
QNNQTTAAIRNVTT

SEQ ID NO: 1626 - protein, 12 aa, Artificial Sequence
  source: /note="Description of Artificial Sequence: Synthetic peptide"
NYNKKSDNVDFT

SEQ ID NO: 1627 - protein, 12 aa, Artificial Sequence
  source: /note="Description of Artificial Sequence: Synthetic peptide"
NYNKKSENVDFT

SEQ ID NO: 1628 - protein, 12 aa, Artificial Sequence
  source: /note="Description of Artificial Sequence: Synthetic peptide"
NYNKKSLNVDFT

SEQ ID NO: 1629 - protein, 12 aa, Artificial Sequence
  source: /note="Description of Artificial Sequence: Synthetic peptide"
NYNKKSPNVDFT

SEQ ID NO: 1630 - protein, 12 aa, Artificial Sequence
  source: /note="Description of Artificial Sequence: Synthetic peptide"
NYSKKSHCVDFT

SEQ ID NO: 1631 - protein, 11 aa, Artificial Sequence
  source: /note="Description of Artificial Sequence: Synthetic peptide"
NYRKTIYVDFT

SEQ ID NO: 1632 - protein, 11 aa, Artificial Sequence
  source: /note="Description of Artificial Sequence: Synthetic peptide"
NYKEKKDVHFT

SEQ ID NO: 1633 - protein, 11 aa, Artificial Sequence
  source: /note="Description of Artificial Sequence: Synthetic peptide"
NYGHRAIVQFT

SEQ ID NO: 1634 - protein, 11 aa, Artificial Sequence
  source: /note="Description of Artificial Sequence: Synthetic peptide"
NYANHQFVVCT

SEQ ID NO: 1635 - protein, 12 aa, Artificial Sequence
  source: /note="Description of Artificial Sequence: Synthetic peptide"
NYDDDPTGVLLT

SEQ ID NO: 1636 - protein, 11 aa, Artificial Sequence
  source: /note="Description of Artificial Sequence: Synthetic peptide"
NYDDPTGVLLT

SEQ ID NO: 1637 - protein, 11 aa, Artificial Sequence
  source: /note="Description of Artificial Sequence: Synthetic peptide"
NFEQQNSVEWT

SEQ ID NO: 1638 - protein, 7 aa, Artificial Sequence
  source: /note="Description of Artificial Sequence: Synthetic peptide"
SQSGASN

SEQ ID NO: 1639 - protein, 6 aa, Artificial Sequence
  source: /note="Description of Artificial Sequence: Synthetic peptide"
NNGSQA

SEQ ID NO: 1640 - protein, 25 aa, Artificial Sequence
  source: /note="Description of Artificial Sequence: Synthetic peptide"
YYLSRTNTPSGTTTWSRLQFSQAGA

SEQ ID NO: 1641 - protein, 16 aa, Artificial Sequence
  source: /note="Description of Artificial Sequence: Synthetic peptide"
SKTSADNNNSEYSWTG

SEQ ID NO: 1642 - protein, 8 aa, Artificial Sequence
  source: /note="Description of Artificial Sequence: Synthetic peptide"
HKDDEEKF

SEQ ID NO: 1643 - protein, 14 aa, Artificial Sequence
  source: /note="Description of Artificial Sequence: Synthetic peptide"
KQGSEKTNVDIEEV

SEQ ID NO: 1644 - protein, 14 aa, Artificial Sequence
  source: /note="Description of Artificial Sequence: Synthetic peptide"
QRGNNQAATADVNT

SEQ ID NO: 1645 - protein, 12 aa, Artificial Sequence
  source: /note="Description of Artificial Sequence: Synthetic peptide"
NYNKKSVNVDFT

SEQ ID NO: 1646 - protein, 42 aa, Artificial Sequence
  source: /note="Description of Artificial Sequence: Synthetic polypeptide"
SQSGASNYNTPSGTTTQSRLQFSTSADNNNSEYSWTGATKYH

SEQ ID NO: 1647 - protein, 42 aa, Artificial Sequence
  source: /note="Description of Artificial Sequence: Synthetic polypeptide"
SASGASNFNSEGGSLTQSSLGFSTDGENNNSDFSWTGATKYH

SEQ ID NO: 1648 - protein, 42 aa, Artificial Sequence
  source: /note="Description of Artificial Sequence: Synthetic polypeptide"
SQSGASNYNTPSGTTTQSRLQFSTDGENNNSDFSWTGATKYH

SEQ ID NO: 1649 - protein, 42 aa, Artificial Sequence
  source: /note="Description of Artificial Sequence: Synthetic polypeptide"
SASGASNYNTPSGTTTQSRLQFSTSADNNNSEFSWPGATTYH

SEQ ID NO: 1650 - protein, 42 aa, Artificial Sequence
  source: /note="Description of Artificial Sequence: Synthetic polypeptide"
SQSGASNFNSEGGSLTQSSLGFSTDGENNNSDFSWTGATKYH

SEQ ID NO: 1651 - protein, 42 aa, Artificial Sequence
  source: /note="Description of Artificial Sequence: Synthetic polypeptide"
SASGASNYNTPSGSLTQSSLGFSTDGENNNSDFSWTGATKYH

SEQ ID NO: 1652 - protein, 42 aa, Artificial Sequence
  source: /note="Description of Artificial Sequence: Synthetic polypeptide"
SQSGASNYNTPSGTTTQSRLQFSTSADNNNSDFSWTGATKYH

SEQ ID NO: 1653 - protein, 42 aa, Artificial Sequence
  source: /note="Description of Artificial Sequence: Synthetic polypeptide"
SGAGASNFNSEGGSLTQSSLGFSTDGENNNSDFSWTGATKYH

SEQ ID NO: 1654 - protein, 7 aa, Artificial Sequence
  source: /note="Description of Artificial Sequence: Synthetic peptide"
SGAGASN

SEQ ID NO: 1655 - protein, 15 aa, Artificial Sequence
  source: /note="Description of Artificial Sequence: Synthetic peptide"
NSEGGSLTQSSLGFS

SEQ ID NO: 1656 - protein, 11 aa, Artificial Sequence
  source: /note="Description of Artificial Sequence: Synthetic peptide"
TDGENNNSDFS

SEQ ID NO: 1657 - protein, 10 aa, Artificial Sequence
  source: /note="Description of Artificial Sequence: Synthetic peptide"
SEFSWPGATT

SEQ ID NO: 1658 - protein, 13 aa, Artificial Sequence
  source: /note="Description of Artificial Sequence: Synthetic peptide"
TSADNNNSDFSWT

SEQ ID NO: 1659 - protein, 8 aa, Artificial Sequence
  source: /note="Description of Artificial Sequence: Synthetic peptide"
SQSGASNY

SEQ ID NO: 1660 - protein, 15 aa, Artificial Sequence
  source: /note="Description of Artificial Sequence: Synthetic peptide"
NTPSGTTTQSRLQFS

SEQ ID NO: 1661 - protein, 19 aa, Artificial Sequence
  source: /note="Description of Artificial Sequence: Synthetic peptide"
TSADNNNSEYSWTGATKYH

SEQ ID NO: 1662 - protein, 8 aa, Artificial Sequence
  source: /note="Description of Artificial Sequence: Synthetic peptide"
SASGASNF

SEQ ID NO: 1663 - protein, 19 aa, Artificial Sequence
  source: /note="Description of Artificial Sequence: Synthetic peptide"
TDGENNNSDFSWTGATKYH

SEQ ID NO: 1664 - protein, 8 aa, Artificial Sequence
  source: /note="Description of Artificial Sequence: Synthetic peptide"
SASGASNY

SEQ ID NO: 1665 - protein, 19 aa, Artificial Sequence
  source: /note="Description of Artificial Sequence: Synthetic peptide"
TSADNNNSEFSWPGATTYH

SEQ ID NO: 1666 - protein, 15 aa, Artificial Sequence
  source: /note="Description of Artificial Sequence: Synthetic peptide"
NTPSGSLTQSSLGFS

SEQ ID NO: 1667 - protein, 19 aa, Artificial Sequence
  source: /note="Description of Artificial Sequence: Synthetic peptide"
TSADNNNSDFSWTGATKYH

SEQ ID NO: 1668 - protein, 8 aa, Artificial Sequence
  source: /note="Description of Artificial Sequence: Synthetic peptide"
SGAGASNF

SEQ ID NO: 1669 - DNA, 48 bp, Artificial Sequence
  source: /note="Description of Artificial Sequence: Synthetic oligonucleotide"
  modified_base (20)..(20): a, c, t, or g
  modified_base (35)..(35): a, c, t, or g
ctccagvvsvvsmrsrvcvnsgcagctdhcvvsrnsgtcvmsacacaa

SEQ ID NO: 1670 - DNA, 48 bp, Artificial Sequence
  source: /note="Description of Artificial Sequence: Synthetic oligonucleotide"
ctccagagaggcaacagacaagcagctaccgcagatgtcaacacacaa

SEQ ID NO: 1671 - protein, 7 aa, Artificial Sequence
  source: /note="Description of Artificial Sequence: Synthetic peptide"
SAAGASN

SEQ ID NO: 1672 - protein, 24 aa, Artificial Sequence
  source: /note="Description of Artificial Sequence: Synthetic peptide"
YFLSRTNTESGSTTQSTLRFSQAG

SEQ ID NO: 1673 - protein, 13 aa, Artificial Sequence
  source: /note="Description of Artificial Sequence: Synthetic peptide"
SKTSADNNNSDFS

SEQ ID NO: 1674 - protein, 14 aa, Artificial Sequence
  source: /note="Description of Artificial Sequence: Synthetic peptide"
KQGSEKTDVDIDKV

SEQ ID NO: 1675 - protein, 7 aa, Artificial Sequence
  source: /note="Description of Artificial Sequence: Synthetic peptide"
STAGASN

SEQ ID NO: 1676 - protein, 24 aa, Artificial Sequence
  source: /note="Description of Artificial Sequence: Synthetic peptide"
YFLSRTNTTSGIETQSTLRFSQAG

SEQ ID NO: 1677 - protein, 13 aa, Artificial Sequence
  source: /note="Description of Artificial Sequence: Synthetic peptide"
SKTDGENNNSDFS

SEQ ID NO: 1678 - protein, 14 aa, Artificial Sequence
  source: /note="Description of Artificial Sequence: Synthetic peptide"
KQGAAADDVEIDGV

SEQ ID NO: 1679 - protein, 7 aa, Artificial Sequence
  source: /note="Description of Artificial Sequence: Synthetic peptide"
SEAGASN

SEQ ID NO: 1680 - protein, 24 aa, Artificial Sequence
  source: /note="Description of Artificial Sequence: Synthetic peptide"
YYLSRTNTPSGTTTQSRLQFSQAG

SEQ ID NO: 1681 - protein, 13 aa, Artificial Sequence
  source: /note="Description of Artificial Sequence: Synthetic peptide"
SKTSADNNNSEYS

SEQ ID NO: 1682 - protein, 14 aa, Artificial Sequence
  source: /note="Description of Artificial Sequence: Synthetic peptide"
KQGSEKTNVDIEKV

SEQ ID NO: 1683 - protein, 24 aa, Artificial Sequence
  source: /note="Description of Artificial Sequence: Synthetic peptide"
YFLSRTNDASGSDTKSTLLFSQAG

SEQ ID NO: 1684 - protein, 13 aa, Artificial Sequence
  source: /note="Description of Artificial Sequence: Synthetic peptide"
STTPSENNNSEYS

SEQ ID NO: 1685 - protein, 7 aa, Artificial Sequence
  source: /note="Description of Artificial Sequence: Synthetic peptide"
SAAGATN

SEQ ID NO: 1686 - protein, 24 aa, Artificial Sequence
  source: /note="Description of Artificial Sequence: Synthetic peptide"
YFLSRTNGEAGSATLSELRFSQAG

SEQ ID NO: 1687 - protein, 8 aa, Artificial Sequence
  source: /note="Description of Artificial Sequence: Synthetic peptide"
HGDDADRF

SEQ ID NO: 1688 - protein, 14 aa, Artificial Sequence
  source: /note="Description of Artificial Sequence: Synthetic peptide"
KQGAEKSDVEVDRV

SEQ ID NO: 1689 - protein, 14 aa, Artificial Sequence
  source: /note="Description of Artificial Sequence: Synthetic peptide"
KQDSGGDNIDIDQV

SEQ ID NO: 1690 - protein, 7 aa, Artificial Sequence
  source: /note="Description of Artificial Sequence: Synthetic peptide"
SDAGASN

SEQ ID NO: 1691 - protein, 24 aa, Artificial Sequence
  source: /note="Description of Artificial Sequence: Synthetic peptide"
YFLSRTNTEGGHDTQSTLRFSQAG

SEQ ID NO: 1692 - protein, 14 aa, Artificial Sequence
  source: /note="Description of Artificial Sequence: Synthetic peptide"
KEDGGGSDVAIDEV

SEQ ID NO: 1693 - protein, 7 aa, Artificial Sequence
  source: /note="Description of Artificial Sequence: Synthetic peptide"
SNAGASN

SEQ ID NO: 1694 - protein, 24 aa, Artificial Sequence
  source: /note="Description of Artificial Sequence: Synthetic peptide"
YFLSRTNGEAGSATLSELRFSQPG

SEQ ID NO: 1695 - DNA, 21 bp, Artificial Sequence
  source: /note="Description of Artificial Sequence: Synthetic oligonucleotide"
agcvvmdcaggarscascaac

SEQ ID NO: 1696 - DNA, 18 bp, Artificial Sequence
  source: /note="Description of Artificial Sequence: Synthetic oligonucleotide"
aacracrrsmrsmaggca

SEQ ID NO: 1697 - DNA, 24 bp, Artificial Sequence
  source: /note="Description of Artificial Sequence: Synthetic oligonucleotide"
cacrrggacrrcrmsrrsarsttt

SEQ ID NO: 1698 - DNA, 75 bp, Artificial Sequence
  source: /note="Description of Artificial Sequence: Synthetic oligonucleotide"
  modified_base (35)..(35): a, c, t, or g
tatttcttgagcagaacaaacrvcvvsrscggamncvhsacgmhstcavvscttvdsttttctcagsbcrgsgcg

SEQ ID NO: 1699 - DNA, 48 bp, Artificial Sequence
  source: /note="Description of Artificial Sequence: Synthetic oligonucleotide"
  modified_base (11)..(11): a, c, t, or g
tcaamammavnsrvcsrsaacaacaacagtrasttctcgtggmmagga

SEQ ID NO: 1700 - DNA, 42 bp, Artificial Sequence
  source: /note="Description of Artificial Sequence: Synthetic oligonucleotide"
  modified_base (31)..(31): a, c, t, or g
aagsaarrcrscrvsrvarvcratrycgmsnhcrvmvrsgtc

SEQ ID NO: 1701 - DNA, 42 bp, Artificial Sequence
  source: /note="Description of Artificial Sequence: Synthetic oligonucleotide"
  modified_base (17)..(17): a, c, t, or g
  modified_base (32)..(32): a, c, t, or g
cagvvsvvsmrsrvcvnsgcagctdhcvvsrnsgtcvmsaca

SEQ ID NO: 1702 - DNA, 33 bp, Artificial Sequence
  source: /note="Description of Artificial Sequence: Synthetic oligonucleotide"
aactwcrvsvasmvsvhsddtgtgswstksact

SEQ ID NO: 1703 - DNA, 30 bp, Artificial Sequence
  source: /note="Description of Artificial Sequence: Synthetic oligonucleotide"
ttgttgaacatcaccacgtgacgcacgttc

SEQ ID NO: 1704 - DNA, 30 bp, Artificial Sequence
  source: /note="Description of Artificial Sequence: Synthetic oligonucleotide"
tccccgtggttctactacataatgtggccg

SEQ ID NO: 1705 - DNA, 30 bp, Artificial Sequence
  source: /note="Description of Artificial Sequence: Synthetic oligonucleotide"
ttccacactccgttttggataatgttgaac

SEQ ID NO: 1706 - DNA, 30 bp, Artificial Sequence
  source: /note="Description of Artificial Sequence: Synthetic oligonucleotide"
agggacatccccagctccatgctgtggtcg

SEQ ID NO: 1707 - DNA, 30 bp, Artificial Sequence
  source: /note="Description of Artificial Sequence: Synthetic oligonucleotide"
agggacaacccctccgactcgccctaatcc

SEQ ID NO: 1708 - DNA, 30 bp, Artificial Sequence
  source: /note="Description of Artificial Sequence: Synthetic oligonucleotide"
tcctagtagaagacaccctctcactgcccg

SEQ ID NO: 1709 - DNA, 30 bp, Artificial Sequence
  source: /note="Description of Artificial Sequence: Synthetic oligonucleotide"
agtaccatgtacacccactctcccagtgcc

SEQ ID NO: 1710 - DNA, 30 bp, Artificial Sequence
  source: /note="Description of Artificial Sequence: Synthetic oligonucleotide"
atatggacgttcatgctgatcaccataccg

SEQ ID NO: 1711 - DNA, 30 bp, Artificial Sequence
  source: /note="Description of Artificial Sequence: Synthetic oligonucleotide"
agcaggagctccttggcctcagcgtgcgag

SEQ ID NO: 1712 - DNA, 30 bp, Artificial Sequence
  source: /note="Description of Artificial Sequence: Synthetic oligonucleotide"
acaagcagcttcactatgacaaccactgac

SEQ ID NO: 1713 - DNA, 284 bp, Artificial Sequence
  source: /note="Description of Artificial Sequence: Synthetic polynucleotide"
  modified_base (59)..(59): a, c, t, or g
  modified_base (244)..(244): a, c, t, or g
cagcctaggaactggcttcctggaccctgttaccgccagcagagagtctcaamammavnsrvcsrsaacaacaacagtrasttctcctggmmaggagctaccaagtaccacctcaatggcagagactctctggtgaatcccggaccagctatggcaagccacrrggacrrcrmsrrsarsttttttcctcagagcggggttctcatctttgggaagsaarrcrscrvsrvarvcratrycgmsnhcrvmvrsgtcatgattacagacgaagaggagatctggac

SEQ ID NO: 1714 - DNA, 34 bp, Artificial Sequence
  source: /note="Description of Artificial Sequence: Synthetic oligonucleotide"
tgggacaatggcggtcgtctctcagagttktkkt

SEQ ID NO: 1715 - DNA, 35 bp, Artificial Sequence
  source: /note="Description of Artificial Sequence: Synthetic oligonucleotide"
agaggacckktcctcgatggttcatggtggagtta

SEQ ID NO: 1716 - DNA, 31 bp, Artificial Sequence
  source: /note="Description of Artificial Sequence: Synthetic oligonucleotide"
ccacttagggcctggtcgataccgttcggtg

SEQ ID NO: 1717 - DNA, 32 bp, Artificial Sequence
  source: /note="Description of Artificial Sequence: Synthetic oligonucleotide"
tctcgccccaagagtagaaacccttcsttyyg

SEQ ID NO: 1718 - protein, 735 aa, Adeno-associated virus 2 [sequence omitted]

SEQ ID NO: 1719 - protein, 736 aa, Adeno-associated virus 9; identical to SEQ ID NO: 134

SEQ ID NO: 1720 - protein, 7 aa, Artificial Sequence
  source: /note="Description of Artificial Sequence: Synthetic peptide"
GSTPPPM

SEQ ID NO: 1721 - protein, 7 aa, Artificial Sequence
  source: /note="Description of Artificial Sequence: Synthetic peptide"
GETRAPL

SEQ ID NO: 1722 - protein, 6 aa, Artificial Sequence
  source: /note="Description of Artificial Sequence: Synthetic peptide"
SPAKFA

SEQ ID NO: 1723 - protein, 6 aa, Artificial Sequence
  source: /note="Description of Artificial Sequence: Synthetic peptide"
NKDKLN

SEQ ID NO: 1724 - protein, 1278 aa, Homo sapiens
MTARGLALGLLLLLLCPAQVFSQSCVWYGECGIAYGDKRYNCEYSGPPKPLPKDGYDLVQELCPGFFFGNVSLCCDVRQLQTLKDNLQLPLQFLSRCPSCFYNLLNLFCELTCSPRQSQFLNVTATEDYVDPVTNQTKTNVKELQYYVGQSFANAMYNACRDVEAPSSNDKALGLLCGKDADACNATNWIEYMFNKDNGQAPFTITPVFSDFPVHGMEPMNNATKGCDESVDEVTAPCSCQDCSIVCGPKPQPPPPPAPWTILGLDAMYVIMWITYMAFLLVFFGAFFAVWCYRKRYFVSEYTPIDSNIAFSVNASDKGEASCCDPVSAAFEGCLRRLFTRWGSFCVRNPGCVIFFSLVFITACSSGLVFVRVTTNPVDLWSAPSSQARLEKEYFDQHFGPFFRTEQLIIRAPLTDKHIYQPYPSGADVPFGPPLDIQILHQVLDLQIAIENITASYDNETVTLQDICLAPLSPYNTNCTILSVLNYFQNSHSVLDHKKGDDFFVYADYHTHFLYCVRAPASLNDTSLLHDPCLGTFGGPVFPWLVLGGYDDQNYNNATALVITFPVNNYYNDTEKLQRAQAWEKEFINFVKNYKNPNLTISFTAERSIEDELNRESDSDVFTVVISYAIMFLYISLALGHMKSCRRLLVDSKVSLGIAGILIVLSSVACSLGVFSYIGLPLTLIVIEVIPFLVLAVGVDNIFILVQAYQRDERLQGETLDQQLGRVLGEVAPSMFLSSFSETVAFFLGALSVMPAVHTFSLFAGLAVFIDFLLQITCFVSLLGLDIKRQEKNRLDIFCCVRGAEDGTSVQASESCLFRFFKNSYSPLLLKDWMRPIVIAIFVGVLSFSIAVLNKVDIGLDQSLSMPDDSYMVDYFKSISQYLHAGPPVYFVLEEGHDYTSSKGQNMVCGGMGCNNDSLVQQIFNAAQLDNYTRIGFAPSSWIDDYFDWVKPQSSCCRVDNITDQFCNASVVDPACVRCRPLTPEGKQRPQGGDFMRFLPMFLSDNPNPKCGKGGHAAYSSAVNILLGHGTRVGATYFMTYHTVLQTSADFIDALKKARLIASNVTETMGINGSAYRVFPYSVFYVFYEQYLTIIDDTIFNLGVSLGAIFLVTMVLLGCELWSAVIMCATIAMVLVNMFGVMWLWGISLNAVSLVNLVMSCGISVEFCSHITRAFTVSMKGSRVERAEEALAHMGSSVFSGITLTKFGGIVVLAFAKSQIFQIFYFRMYLAMVLLGATHGLIFLPVLLSYIGPSVNKAKSCATEERYKGTERERLLNF

SEQ ID NO: 1725 - DNA, 4760 bp, Homo sapiens
cttcctgaccggcgcgcgcagcctgctgccgcggtcagcgcctgctcctgctcctccgctcctcctgcgcggggtgctgaaacagcccggggaagtagagccgcctccggggagcccaaccagccgaacgccgccggcgtcagcagccttgcgcggccacagcatgaccgctcgcggcctggcccttggcctcctcctgctgctactgtgtccagcgcaggtgttttcacagtcctgtgtttggtatggagagtgtggaattgcatatggggacaagaggtacaattgcgaatattctggcccaccaaaaccattgccaaaggatggatatgacttagtgcaggaactctgtccaggattcttctttggcaatgtcagtctctgttgtgatgttcggcagcttcagacactaaaagacaacctgcagctgcctctacagtttctgtccagatgtccatcctgtttttataacctactgaacctgttttgtgagctgacatgtagccctcgacagagtcagtttttgaatgttacagctactgaagattatgttgatcctgttacaaaccagacgaaaacaaatgtgaaagagttacaatactacgtcggacagagttttgccaatgcaatgtacaatgcctgccgggatgtggaggccccctcaagtaatgacaaggccctgggactcctgtgtgggaaggacgctgacgcctgtaatgccaccaactggattgaatacatgttcaataaggacaatggacaggcaccttttaccatcactcctgtgttttcagattttccagtccatgggatggagcccatgaacaatgccaccaaaggctgtgacgagtctgtggatgaggtcacagcaccatgtagctgccaagactgctctattgtctgtggccccaagccccagcccccacctcctcctgctccctggacgatccttggcttggacgccatgtatgtcatcatgtggatcacctacatggcgtttttgcttgtgttttttggagcattttttgcagtgtggtgctacagaaaacggtattttgtctccgagtacactcccatcgatagcaatatagctttttctgttaatgcaagtgacaaaggagaggcgtcctgctgtgaccctgtcagcgcagcatttgagggctgcttgaggcggctgttcacacgctgggggtctttctgcgtccgaaaccctggctgtgtcattttcttctcgctggtcttcattactgcgtgttcgtcaggcctggtgtttgtccgggtcacaaccaatccagttgacctctggtcagcccccagcagccaggctcgcctggaaaaagagtactttgaccagcactttgggcctttcttccggacggagcagctcatcatccgggcccctctcactgacaaacacatttaccagccatacccttcgggagctgatgtaccctttggacctccgcttgacatacagatactgcaccaggttcttgacttacaaatagccatcgaaaacattactgcctcttatgacaatgagactgtgacacttcaagacatctgcttggcccctctttcaccgtataacacgaactgcaccattttgagtgtgttaaattacttccagaacagccattccgtgctggaccacaagaaaggggacgacttctttgtgtatgccgattaccacacgcactttctgtactgcgtacgggctcctgcctctctgaatgatacaagtttgctccatgacccttgtctgggtacgtttggtggaccagtgttcccgtggcttgtgttgggaggctatgatgatcaaaactacaataacgccactgcccttgtgattaccttccctgtcaataattactataatgatacagagaagctccagagggcccaggcctgggaaaaagagtttattaattttgtgaaaaactacaagaatcccaatctgaccatttccttcactgctgaacgaagtattgaagatgaactaaatcgtgaaagtgacagtgatgtcttcaccgttgtaattagctatgccatcatgtttctatatatttccctagccttggggcacatgaaaagctgtcgcaggcttctggtggattcgaaggtctcactaggcatcgcgggcatcttgatcgtgctgagctcggtggcttgctccttgggtgtcttcagctacattgggttgcccttgaccctcattgtgattgaagtcatcccgttcctggtgctggctgttggagtggacaacatcttcattctggtgcaggcctaccagagagatgaacgtcttcaaggggaaaccctggatcagcagctgggcagggtcctaggagaagtggctcccagtatgttcctgtcatccttttctgagactgtagcatttttcttaggagcattgtccgtgatgccagccgtgcacaccttctctctctttgcgggattggcagtcttcattgactttcttctgcagattacctgtttcgtgagtctcttggggttagacattaaacgtcaagagaaaaatcggctagacatcttttgctgtgtcagaggtgctgaagatggaacaagcgtccaggcctcagagagctgtttgtttcgcttcttcaaaaactcctattctccacttctgctaaaggactggatgagaccaattgtgatagcaatatttgtgggtgttctgtcattcagcatcgcagtcctgaacaaagtagatattggattggatcagtctctttcgatgccagatgactcctacatggtggattatttcaaatccatcagtcagtacctgcatgcgggtccgcctgtgtactttgtcctggaggaagggcacgactacacttcttccaaggggcagaacatggtgtgcggcggcatgggctgcaacaatgattccctggtgcagcagatatttaacgcggcgcagctggacaactatacccgaataggcttcgccccctcgtcctggatcgacgattatttcgactgggtgaagccacagtcgtcttgctgtcgagtggacaatatcactgaccagttctgcaatgcttcagtggttgaccctgcctgcgttcgctgcaggcctctgactccggaaggcaaacagaggcctcaggggggagacttcatgagattcctgcccatgttcctttcggataaccctaaccccaagtgtggcaaagggggacatgctgcctatagttctgcagttaacatcctccttggccatggcaccagggtcggagccacgtacttcatgacctaccacaccgtgctgcagacctctgctgactttattgacgctctgaagaaagcccgacttatagccagtaatgtcaccgaaaccatgggcattaacggcagtgcctaccgagtatttccttacagtgtgttttatgtcttctacgaacagtacctgaccatcattgacgacactatcttcaacctcggtgtgtccctgggcgcgatatttctggtgaccatggtcctcctgggctgtgagctctggtctgcagtcatcatgtgtgccaccatcgccatggtcttggtcaacatgtttggagttatgtggctctggggcatcagtctgaacgctgtatccttggtcaacctggtgatgagctgtggcatctccgtggagttctgcagccacataaccagagcgttcacggtgagcatgaaaggcagccgcgtggagcgcgcggaagaggcacttgcccacatgggcagctccgtgttcagtggaatcacacttacaaaatttggagggattgtggtgttggcttttgccaaatctcaaattttccagatattctacttcaggatgtatttggccatggtcttactgggagccactcacggattaatatttctccctgtcttactcagttacatagggccatcagtaaataaagccaaaagttgtgccactgaagagcgatacaaaggaacagagcgcgaacggcttctaaatttctagccctctcgcagggcatcctgactgaactgtgtctaagggtcggtcggtttaccactggacgggtgctgcatcggcaaggccaagttgaacaccggatggtgccaaccatcggttgtttggcagcagctttgaacgtagcgcctgtgaactcaggaatgcacagttgacttgggaagcagtattactagatctggaggcaaccacaggacactaaacttctcccagcctcttcaggaaagaaacctcattctttggcaagcaggaggtgacactagatggctgtgaatgtgatccgctcactgacactctgtaaaggccaatcaatgcactgtctgtctctccttttaggagtaagccatcccacaagttctataccatatttttagtgacagttgaggttgtagatacactttataacattttatagtttaaagagctttattaatgcaataaattaactttgtacacatttttatataaaaaaacagcaagtgatttcagaatgttgtaggcctcattagagcttggtctccaaaaatctgtttgaaaaaagcaacatgttcttcacagtgttcccctagaaaggaagagatttaattgccagttagatgtggcatgaaatgagggacaaagaaagcatctcgtaggtgtgtctactgggttttaacttatttttctttaataaaatacattgttttcctaagttttggggttaccctatctgctttgagagacaaatacaaaagctaaatggaagaga

SEQ ID NO: 1726 - protein, 151 aa, Homo sapiens
MRFLAATFLLLALSTAAQAEPVQFKDCGSVDGVIKEVNVSPCPTQPCQLSKGQSYSVNVTFTSNIQSKSSKAVVHGILMGVPVPFPIPEPDGCKSGINCPIQKDKTYSYLNKLPVKSEYPSIKLVVEWQLQDDKNQSLFCWEIPVQIVSHL

SEQ ID NO: 1727 - DNA, 821 bp, Homo sapiens
ctttcccgagcttggaacttcgttatccgcgatgcgtttcctggcagctacattcctgctcctggcgctcagcaccgctgcccaggccgaaccggtgcagttcaaggactgcggttctgtggatggagttataaaggaagtgaatgtgagcccatgccccacccaaccctgccagctgagcaaaggacagtcttacagcgtcaatgtcaccttcaccagcaatattcagtctaaaagcagcaaggccgtggtgcatggcatcctgatgggcgtcccagttccctttcccattcctgagcctgatggttgtaagagtggaattaactgccctatccaaaaagacaagacctatagctacctgaataaactaccagtgaaaagcgaatatccctctataaaactggtggtggagtggcaacttcaggatgacaaaaaccaaagtctcttctgctgggaaatcccagtacagatcgtttctcatctctaagtgcctcattgagttcggtgcatctggccaatgagtctgctgagactcttgacagcacctccagctctgctgcttcaacaacagtgacttgctctccaatggtatccagtgattcgttgaagaggaggtgctctgtagcagaaactgagctccgggtggctggttctcagtggttgtctcatgtctctttttctgtcttaggtggtttcattaaatgcagcacttggttagcagatgtttaattttttttttaacaacattaacttgtggcctctttctacacctggaaatttactcttgaataaataaaaactcgtttgtcttgtcttctgca

SEQ ID NO: 1728 - protein, 174 aa, Homo sapiens
MRFLAATFLLLALSTAAQAEPVQFKDCGSVDGVIKEVNVSPCPTQPCQLSKGQSYSVNVTFTSNIQSKSSKAVVHGILMGVPVPFPIPEPDGCKSGINCPIQKDKTYSYLNKLPVKSEYPSIKLVVEWQLQDDKNQSLFCWEIPVQIVSLSGGERAWVEGRKWRRNQTETKSVP

SEQ ID NO: 1729 - DNA, 1446 bp, Homo sapiens
ggtccgggcgggtcaggcctctgaggggatggcatgggcggagactgcaggcttctgggcctgagagggctggagctggctttccggagccgggggcggggcgcgggcgggcctcagctgtggttactggtgacaggtcgcctgactgggctcctccccgggcccgccccgacaggtttgtcttgtgaccgcgggcggccgctgcttctttcccgagcttggaacttcgttatccgcgatgcgtttcctggcagctacattcctgctcctggcgctcagcaccgctgcccaggccgaaccggtgcagttcaaggactgcggttctgtggatggagttataaaggaagtgaatgtgagcccatgccccacccaaccctgccagctgagcaaaggacagtcttacagcgtcaatgtcaccttcaccagcaatattcagtctaaaagcagcaaggccgtggtgcatggcatcctgatgggcgtcccagttccctttcccattcctgagcctgatggttgtaagagtggaattaactgccctatccaaaaagacaagacctatagctacctgaataaactaccagtgaaaagcgaatatccctctataaaactggtggtggagtggcaacttcaggatgacaaaaaccaaagtctcttctgctgggaaatcccagtacagatcgtaagtctatctgggggtgagagggcatgggtggagggaagaaagtggaggagaaatcagactgaaactaaatcagtgccataagataaaaggaatttcaagactgctgttttatgcctctcaacctctaaaagcatctgagaccctatttcctgagagctcagaactgttgcctttgtaatatcctttgttaaaaaaaaaaaaggttgaaggaaagaagagagagtgagactgtagagattgatttaactgtcttcattggtttttttctgtcggagtaaggaaggtccagccagacaggacctgaaggaggttgcttaggaatgtctgataacttgccctagggttattgccctgacagtggaggaaaggttccaaaccacttccactgagctgggacattacatccacaggtttctcatctctaagtgcctcattgagttcggtgcatctggccaatgagtctgctgagactcttgacagcacctccagctctgctgcttcaacaacagtgacttgctctccaatggtatccagtgattcgttgaagaggaggtgctctgtagcagaaactgagctccgggtggctggttctcagtggttgtctcatgtctctttttctgtcttaggtggtttcattaaatgcagcacttggttagcagatgtttaattttttttttaacaacattaacttgtggcctctttctacacctggaaatttactcttgaataaataaaaactcgtttgtcttgtcttctgcatgtgg

SEQ ID NO: 1730 - protein, 125 aa, Homo sapiens
MRFLAATFLLLALSTAAQAEPVQFKDCGSVDGVIKEVNVSPCPTQPCQLSKGQSYSVNVTFTSNIQSKSSKAVVHGILMGVPVPFPIPEPDGCKSGINCPIQKDKTYSYLNKLPVKSEYPSVSHL

SEQ ID NO: 1731 - DNA, 743 bp, Homo sapiens
ctttcccgagcttggaacttcgttatccgcgatgcgtttcctggcagctacattcctgctcctggcgctcagcaccgctgcccaggccgaaccggtgcagttcaaggactgcggttctgtggatggagttataaaggaagtgaatgtgagcccatgccccacccaaccctgccagctgagcaaaggacagtcttacagcgtcaatgtcaccttcaccagcaatattcagtctaaaagcagcaaggccgtggtgcatggcatcctgatgggcgtcccagttccctttcccattcctgagcctgatggttgtaagagtggaattaactgccctatccaaaaagacaagacctatagctacctgaataaactaccagtgaaaagcgaatatccctctgtttctcatctctaagtgcctcattgagttcggtgcatctggccaatgagtctgctgagactcttgacagcacctccagctctgctgcttcaacaacagtgacttgctctccaatggtatccagtgattcgttgaagaggaggtgctctgtagcagaaactgagctccgggtggctggttctcagtggttgtctcatgtctctttttctgtcttaggtggtttcattaaatgcagcacttggttagcagatgtttaattttttttttaacaacattaacttgtggcctctttctacacctggaaatttactcttgaataaataaaaactcgtttgtcttgtcttctgca

SEQ ID NO: 1732 - DNA, 849 bp, Macaca mulatta
gtcgcctgactgggctcctccccgggcccgcccccacaggtttgtcttgtgaccgcgggcggccgccgcttctttccagagattggaacttcgttttccgcgatgcgtttcctggccgctacattcctgctcctggcgctcagcaccgccgcccaggccgaacccgtgcagttcaaggactgcggttctgtggatggagttataaaggaagtgaatgtgagcccgtgccccacccagccctgccaactgagcaaaggacagtcttacagcgtcaatgtcacctttaccagcaatattcagtctaaaagcagcaaggccgtggtgcatggcatcctgatgggcgtcccagttccctttcccattcctgagcctgatggttgtaaaagtggaattaactgtcccatccaaaaagacaagacctatagctacctgaataaactaccagtgaaaagcgaatatccctctataaaattggtggtggagtggcaacttcaagatgacaaaaaccaaagtctcttctgctgggaaatcccagtacagatcgtttctcatctctaagtgcctcattgagttcggtgcatctggccaacgagtctgctgactcttgacagcgcctccagctctgctgcttcaacaacagtgacttgctctccaatggtatccagtgattcgttgaagaggaggtgctctgtggcagaaactcagctccgggtggctggttctcagtggttgtctcatgtctctttttctttcttaggtggttttcattaaatgcagacttggttagcagaggtttaatttttttttagcaatattaacttgtggcctctttctacacctggaaatgta

SEQ ID NO: 1733 - DNA, 130 bp, Artificial Sequence
  source: /note="Description of Artificial Sequence: Synthetic polynucleotide"
ctgcgcgctcgctcgctcactgaggccgcccgggcaaagcccgggcgtcgggcgacctttggtcgcccggcctcagtgagcgagcgagcgcgcagagagggagtggccaactccatcactaggggttcct

SEQ ID NO: 1734 - DNA, 130 bp, Artificial Sequence
  source: /note="Description of Artificial Sequence: Synthetic polynucleotide"
aggaacccctagtgatggagttggccactccctctctgcgcgctcgctcgctcactgaggccgggcgaccaaaggtcgcccgacgcccgggctttgcccgggcggcctcagtgagcgagcgagcgcgcag

SEQ ID NO: 1735 - DNA, 260 bp, Artificial Sequence
  source: /note="Description of Artificial Sequence: Synthetic polynucleotide"
ccacgttctgcttcactctccccatctcccccccctccccacccccaattttgtatttatttattttttaattattttgtgcagcgatgggggcggggggggggggcgcgcgccaggcggggcggggcggggcgaggggcggggcggggcgaggcggagaggtgcggcggcagccaatcagagcggcgcgctccgaaagtttccttttatggcgaggcggcggcggcggcggccctataaaaagcgaagcgcgcggcggg

SEQ ID NO: 1736 - DNA, 205 bp, Artificial Sequence
  source: /note="Description of Artificial Sequence: Synthetic polynucleotide"
gtgatgcggttttggcagtacatcaatgggcgtggatagcggtttgactcacggggatttccaagtctccaccccattgacgtcaatgggagtttgttttggcaccaaaatcaacgggactttccaaaatgtcgtaacaactccgccccattgacgcaaatgggcggtaggcgtgtacggtgggaggtctatataagcagagctc

SEQ ID NO: 1737 - DNA, 380 bp, Artificial Sequence
  source: /note="Description of Artificial Sequence: Synthetic polynucleotide"
gacattgattattgactagttattaatagtaatcaattacggggtcattagttcatagcccatatatggagttccgcgttacataacttacggtaaatggcccgcctggctgaccgcccaacgacccccgcccattgacgtcaataatgacgtatgttcccatagtaacgccaatagggactttccattgacgtcaatgggtggagtatttacggtaaactgcccacttggcagtacatcaagtgtatcatatgccaagtacgccccctattgacgtcaatgacggtaaatggcccgcctggcattatgcccagtacatgaccttatgggactttcctacttggcagtacatctacgtattagtcatcgctattaccatg

SEQ ID NO: 1738 - DNA, 339 bp, Artificial Sequence
  source: /note="Description of Artificial Sequence: Synthetic polynucleotide"
tacatgaccttatgggactttcctacttggcagtacatctacgtattagtcatcgctattaccatgtcgaggccacgttctgcttcactctccccatctcccccccctccccacccccaattttgtatttatttattttttaattattttgtgcagcgatgggggcggggggggggggcgcgcgccaggcggggcggggcggggcgaggggcggggcggggcgaggcggagaggtgcggcggcagccaatcagagcggcgcgctccgaaagtttccttttatggcgaggcggcggcggcggcggccctataaaaagcgaagcgcgcggcgggcgggagc

SEQ ID NO: 1739 - DNA, 361 bp, Artificial Sequence
  source: /note="Description of Artificial Sequence: Synthetic polynucleotide"
cacttggcagtacatcaagtgtatcatatgccaagtacgccccctattgacgtcaatgacggtaaatggcccgcctggcattatgcccagtacatgaccttatgggactttcctacttggcagtacatctacgtattagtcatcgctattaccatggtgatgcggttttggcagtacatcaatgggcgtggatagcggtttgactcacggggatttccaagtctccaccccattgacgtcaatgggagtttgttttggcaccaaaatcaacgggactttccaaaatgtcgtaacaactccgccccattgacgcaaatgggcggtaggcgtgtacggtgggaggtctatataagcagagctc

SEQ ID NO: 1740 - DNA, 289 bp, Artificial Sequence
  source: /note="Description of Artificial Sequence: Synthetic polynucleotide"
gcctggcattatgcccagtacatgaccttatgggactttcctacttggcagtacatctacgtattagtcatcgctattaccatggtgatgcggttttggcagtacatcaatgggcgtggatagcggtttgactcacggggatttccaagtctccaccccattgacgtcaatgggagtttgttttggcaccaaaatcaacgggactttccaaaatgtcgtaacaactccgccccattgacgcaaatgggcggtaggcgtgtacggtgggaggtctatataagcagagctc

SEQ ID NO: 1741 - DNA, 163 bp, Artificial Sequence
  source: /note="Description of Artificial Sequence: Synthetic polynucleotide"
tttgactcacggggatttccaagtctccaccccattgacgtcaatgggagtttgttttggcaccaaaatcaacgggactttccaaaatgtcgtaacaactccgccccattgacgcaaatgggcggtaggcgtgtacggtgggaggtctatataagcagagctc

SEQ ID NO: 1742 - DNA, 66 bp, Artificial Sequence
  source: /note="Description of Artificial Sequence: Synthetic oligonucleotide"
tacatgaccttatgggactttcctacttggcagtacatctacgtattagtcatcgctattaccatg

SEQ ID NO: 1743 - DNA, 156 bp, Artificial Sequence
  source: /note="Description of Artificial Sequence: Synthetic polynucleotide"
cacttggcagtacatcaagtgtatcatatgccaagtacgccccctattgacgtcaatgacggtaaatggcccgcctggcattatgcccagtacatgaccttatgggactttcctacttggcagtacatctacgtattagtcatcgctattaccatg

SEQ ID NO: 1744 - DNA, 109 bp, Artificial Sequence
  source: /note="Description of Artificial Sequence: Synthetic polynucleotide"
ttttggcaccaaaatcaacgggactttccaaaatgtcgtaacaactccgccccattgacgcaaatgggcggtaggcgtgtacggtgggaggtctatataagcagagctc

SEQ ID NO: 1745 - DNA, 227 bp, Artificial Sequence
  source: /note="Description of Artificial Sequence: Synthetic polynucleotide"
gcccgtcagtgggcagagcgcacatcgcccacagtccccgagaagttggggggaggggtcggcaattgaaccggtgcctagagaaggtggcgcggggtaaactgggaaagtgatgtcgtgtactggctccgcctttttcccgagggtgggggagaaccgtatataagtgcagtagtcgccgtgaacgttctttttcgcaacgggtttgccgccagaacacgcgtaag

SEQ ID NO: 1746 - DNA, 9 bp, Artificial Sequence
  source: /note="Description of Artificial Sequence: Synthetic oligonucleotide"
gccgccacc

SEQ ID NO: 1747 - DNA, 3837 bp, Homo sapiens
atgaccgctcgcggcctggcccttggcctcctcctgctgctactgtgtccagcgcaggtgttttcacagtcctgtgtttggtatggagagtgtggaattgcatatggggacaagaggtacaattgcgaatattctggcccaccaaaaccattgccaaaggatggatatgacttagtgcaggaactctgtccaggattcttctttggcaatgtcagtctctgttgtgatgttcggcagcttcagacactaaaagacaacctgcagctgcctctacagtttctgtccagatgtccatcctgtttttataacctactgaacctgttttgtgagctgacatgtagccctcgacagagtcagtttttgaatgttacagctactgaagattatgttgatcctgttacaaaccagacgaaaacaaatgtgaaagagttacaatactacgtcggacagagttttgccaatgcaatgtacaatgcctgccgggatgtggaggccccctcaagtaatgacaaggccctgggactcctgtgtgggaaggacgctgacgcctgtaatgccaccaactggattgaatacatgttcaataaggacaatggacaggcaccttttaccatcactcctgtgttttcagattttccagtccatgggatggagcccatgaacaatgccaccaaaggctgtgacgagtctgtggatgaggtcacagcaccatgtagctgccaagactgctctattgtctgtggccccaagccccagcccccacctcctcctgctccctggacgatccttggcttggacgccatgtatgtcatcatgtggatcacctacatggcgtttttgcttgtgttttttggagcattttttgcagtgtggtgctacagaaaacggtattttgtctccgagtacactcccatcgatagcaatatagctttttctgttaatgcaagtgacaaaggagaggcgtcctgctgtgaccctgtcagcgcagcatttgagggctgcttgaggcggctgttcacacgctgggggtctttctgcgtccgaaaccctggctgtgtcattttcttctcgctggtcttcattactgcgtgttcgtcaggcctggtgtttgtccgggtcacaaccaatccagttgacctctggtcagcccccagcagccaggctcgcctggaaaaagagtactttgaccagcactttgggcctttcttccggacggagcagctcatcatccgggcccctctcactgacaaacacatttaccagccatacccttcgggagctgatgtaccctttggacctccgcttgacatacagatactgcaccaggttcttgacttacaaatagccatcgaaaacattactgcctcttatgacaatgagactgtgacacttcaagacatctgcttggcccctctttcaccgtataacacgaactgcaccattttgagtgtgttaaattacttccagaacagccattccgtgctggaccacaagaaaggggacgacttctttgtgtatgccgattaccacacgcactttctgtactgcgtacgggctcctgcctctctgaatgatacaagtttgctccatgacccttgtctgggtacgtttggtggaccagtgttcccgtggcttgtgttgggaggctatgatgatcaaaactacaataacgccactgcccttgtgattaccttccctgtcaataattactataatgatacagagaagctccagagggcccaggcctgggaaaaagagtttattaattttgtgaaaaactacaagaatcccaatctgaccatttccttcactgctgaacgaagtattgaagatgaactaaatcgtgaaagtgacagtgatgtcttcaccgttgtaattagctatgccatcatgtttctatatatttccctagccttggggcacatcaaaagctgtcgcaggcttctggtggattcgaaggtctcactaggcatcgcgggcatcttgatcgtgctgagctcggtggcttgctccttgggtgtcttcagctacattgggttgcccttgaccctcattgtgattgaagtcatcccgttcctggtgctggctgttggagtggacaacatcttcattctggtgcaggcctaccagagagatgaacgtcttcaaggggaaaccctggatcagcagctgggcagggtcctaggagaagtggctcccagtatgttcctgtcatccttttctgagactgtagcatttttcttaggagcattgtccgtgatgccagccgtgcacaccttctctctctttgcgggattggcagtcttcattgactttcttctgcagattacctgtttcgtgagtctcttggggttagacattaaacgtcaagagaaaaatcggctagacatcttttgctgtgtcagaggtgctgaagatggaacaagcgtccaggcctcagagagctgtttgtttcgcttcttcaaaaactcctattctccacttctgctaaaggactggatgagaccaattgtgatagcaatatttgtgggtgttctgtcattcagcatcgcagtcctgaacaaagtagatattggattggatcagtctctttcgatgccagatgactcctacatggtggattatttcaaatccatcagtcagtacctgcatgcgggtccgcctgtgtactttgtcctggaggaagggcacgactacacttcttccaaggggcagaacatggtgtgcggcggcatgggctgcaacaatgattccctggtgcagcagatatttaacgcggcgcagctggacaactatacccgaataggcttcgccccctcgtcctggatcgacgattatttcgactgggtgaagccacagtcgtcttgctgtcgagtggacaatatcactgaccagttctgcaatgcttcagtggttgaccctgcctgcgttcgctgcaggcctctgactccggaaggcaaacagaggcctcaggggggagacttcatgagattcctgcccatgttcctttcggataaccctaaccccaagtgtggcaaagggggacatgctgcctatagttctgcagttaacatcctccttggccatggcaccagggtcggagccacgtacttcatgacctaccacaccgtgctgcagacctctgctgactttattgacgctctgaagaaagcccgacttatagccagtaatgtcaccgaaaccatgggcattaacggcagtgcctaccgagtatttccttacagtgtgttttatgtcttctacgaacagtacctgaccatcattgacgacactatcttcaacctcggtgtgtccctgggcgcgatatttctggtgaccatggtcctcctgggctgtgagctctggtctgcagtcatcatgtgtgccaccatcgccatggtcttggtcaacatgtttggagttatgtggctctggggcatcagtctgaacgctgtatccttggtcaacctggtgatgagctgtggcatctccgtggagttctgcagccacataaccagagcgttcacggtgagcatgaaaggcagccgcgtggagcgcgcggaagaggcacttgcccacatgggcagctccgtgttcagtggaatcacacttacaaaatttggagggattgtggtgttggcttttgccaaatctcaaattttccagatattctacttcaggatgtatttggccatggtcttactgggagccactcacggattaatatttctccctgtcttactcagttacatagggccatcagtaaataaagccaaaagttgtgccactgaagagcgatacaaaggaacagagcgcgaacggcttctaaatttctag

SEQ ID NO: 1748 - protein, 1278 aa, Homo sapiens
MTARGLALGLLLLLLCPAQVFSQSCVWYGECGIAYGDKRYNCEYSGPPKPLPKDGYDLVQELCPGFFFGNVSLCCDVRQLQTLKDNLQLPLQFLSRCPSCFYNLLNLFCELTCSPRQSQFLNVTATEDYVDPVTNQTKTNVKELQYYVGQSFANAMYNACRDVEAPSSNDKALGLLCGKDADACNATNWIEYMFNKDNGQAPFTITPVFSDFPVHGMEPMNNATKGCDESVDEVTAPCSCQDCSIVCGPKPQPPPPPAPWTILGLDAMYVIMWITYMAFLLVFFGAFFAVWCYRKRYFVSEYTPIDSNIAFSVNASDKGEASCCDPVSAAFEGCLRRLFTRWGSFCVRNPGCVIFFSLVFITACSSGLVFVRVTTNPVDLWSAPSSQARLEKEYFDQHFGPFFRTEQLIIRAPLTDKHIYQPYPSGADVPFGPPLDIQILHQVLDLQIAIENITASYDNETVTLQDICLAPLSPYNTNCTILSVLNYFQNSHSVLDHKKGDDFFVYADYHTHFLYCVRAPASLNDTSLLHDPCLGTFGGPVFPWLVLGGYDDQNYNNATALVITFPVNNYYNDTEKLQRAQAWEKEFINFVKNYKNPNLTISFTAERSIEDELNRESDSDVFTVVISYAIMFLYISLALGHIKSCRRLLVDSKVSLGIAGILIVLSSVACSLGVFSYIGLPLTLIVIEVIPFLVLAVGVDNIFILVQAYQRDERLQGETLDQQLGRVLGEVAPSMFLSSFSETVAFFLGALSVMPAVHTFSLFAGLAVFIDFLLQITCFVSLLGLDIKRQEKNRLDIFCCVRGAEDGTSVQASESCLFRFFKNSYSPLLLKDWMRPIVIAIFVGVLSFSIAVLNKVDIGLDQSLSMPDDSYMVDYFKSISQYLHAGPPVYFVLEEGHDYTSSKGQNMVCGGMGCNNDSLVQQIFNAAQLDNYTRIGFAPSSWIDDYFDWVKPQSSCCRVDNITDQFCNASVVDPACVRCRPLTPEGKQRPQGGDFMRFLPMFLSDNPNPKCGKGGHAAYSSAVNILLGHGTRVGATYFMTYHTVLQTSADFIDALKKARLIASNVTETMGINGSAYRVFPYSVFYVFYEQYLTIIDDTIFNLGVSLGAIFLVTMVLLGCELWSAVIMCATIAMVLVNMFGVMWLWGISLNAVSLVNLVMSCGISVEFCSHITRAFTVSMKGSRVERAEEALAHMGSSVFSGITLTKFGGIVVLAFAKSQIFQIFYFRMYLAMVLLGATHGLIFLPVLLSYIGPSVNKAKSCATEERYKGTERERLLNF

SEQ ID NO: 1749 - DNA, 3837 bp, Artificial Sequence
  source: /note="Description of Artificial Sequence: Synthetic polynucleotide"
atgaccgccagaggcctggccctgggcctgctgctgctgctgctgtgccccgcccaggtgttcagccagagctgcgtgtggtacggcgagtgcggcatcgcctacggcgacaagagatacaactgcgagtacagcggcccccccaagcccctgcccaaggacggctacgacctggtgcaggagctgtgccccggcttcttcttcggcaacgtgagcctgtgctgcgacgtgagacagctgcagaccctgaaggacaacctgcagctgcccctgcagttcctgagcagatgccccagctgcttctacaacctgctgaacctgttctgcgagctgacctgcagccccagacagagccagttcctgaacgtgaccgccaccgaggactacgtggaccccgtgaccaaccagaccaagaccaacgtgaaggagctgcagtactacgtgggccagagcttcgccaacgccatgtacaacgcctgcagagacgtggaggcccccagcagcaacgacaaggccctgggcctgctgtgcggcaaggacgccgacgcctgcaacgccaccaactggatcgagtacatgttcaacaaggacaacggccaggcccccttcaccatcacccccgtgttcagcgacttccccgtgcacggcatggagcccatgaacaacgccaccaagggctgcgacgagagcgtggacgaggtgaccgccccctgcagctgccaggactgcagcatcgtgtgcggccccaagccccagcccccccccccccccgccccctggaccatcctgggcctggacgccatgtacgtgatcatgtggatcacctacatggccttcctgctggtgttcttcggcgccttcttcgccgtgtggtgctacagaaagagatacttcgtgagcgagtacacccccatcgacagcaacatcgccttcagcgtgaacgccagcgacaagggcgaggccagctgctgcgaccccgtgagcgccgccttcgagggctgcctgagaagactgttcaccagatggggcagcttctgcgtgagaaaccccggctgcgtgatcttcttcagcctggtgttcatcaccgcctgcagcagcggcctggtgttcgtgagagtgaccaccaaccccgtggacctgtggagcgcccccagcagccaggccagactggagaaggagtacttcgaccagcacttcggccccttcttcagaaccgagcagctgatcatcagagcccccctgaccgacaagcacatctaccagccctaccccagcggcgccgacgtgcccttcggcccccccctggacatccagatcctgcaccaggtgctggacctgcagatcgccatcgagaacatcaccgccagctacgacaacgagaccgtgaccctgcaggacatctgcctggcccccctgagcccctacaacaccaactgcaccatcctgagcgtgctgaactacttccagaacagccacagcgtgctggaccacaagaagggcgacgacttcttcgtgtacgccgactaccacacccacttcctgtactgcgtgagagcccccgccagcctgaacgacaccagcctgctgcacgacccctgcctgggcaccttcggcggccccgtgttcccctggctggtgctgggcggctacgacgaccagaactacaacaacgccaccgccctggtgatcaccttccccgtgaacaactactacaacgacaccgagaagctgcagagagcccaggcctgggagaaggagttcatcaacttcgtgaagaactacaagaaccccaacctgaccatcagcttcaccgccgagagaagcatcgaggacgagctgaacagagagagcgacagcgacgtgttcaccgtggtgatcagctacgccatcatgttcctgtacatcagcctggccctgggccacatcaagagctgcagaagactgctggtggacagcaaggtgagcctgggcatcgccggcatcctgatcgtgctgagcagcgtggcctgcagcctgggcgtgttcagctacatcggcctgcccctgaccctgatcgtgatcgaggtgatccccttcctggtgctggccgtgggcgtggacaacatcttcatcctggtgcaggcctaccagagagacgagagactgcagggcgagaccctggaccagcagctgggcagagtgctgggcgaggtggcccccagcatgttcctgagcagcttcagcgagaccgtggccttcttcctgggcgccctgagcgtgatgcccgccgtgcacaccttcagcctgttcgccggcctggccgtgttcatcgacttcctgctgcagatcacctgcttcgtgagcctgctgggcctggacatcaagagacaggagaagaacagactggacatcttctgctgcgtgagaggcgccgaggacggcaccagcgtgcaggccagcgagagctgcctgttcagattcttcaagaacagctacagccccctgctgctgaaggactggatgagacccatcgtgatcgccatcttcgtgggcgtgctgagcttcagcatcgccgtgctgaacaaggtggacatcggcctggaccagagcctgagcatgcccgacgacagctacatggtggactacttcaagagcatcagccagtacctgcacgccggcccccccgtgtacttcgtgctggaggagggccacgactacaccagcagcaagggccagaacatggtgtgcggcggcatgggctgcaacaacgacagcctggtgcagcagatcttcaacgccgcccagctggacaactacaccagaatcggcttcgcccccagcagctggatcgacgactacttcgactgggtgaagccccagagcagctgctgcagagtggacaacatcaccgaccagttctgcaacgccagcgtggtggaccccgcctgcgtgagatgcagacccctgacccccgagggcaagcagagaccccagggcggcgacttcatgagattcctgcccatgttcctgagcgacaaccccaaccccaagtgcggcaagggcggccacgccgcctacagcagcgccgtgaacatcctgctgggccacggcaccagagtgggcgccacctacttcatgacctaccacaccgtgctgcagaccagcgccgacttcatcgacgccctgaagaaggccagactgatcgccagcaacgtgaccgagaccatgggcatcaacggcagcgcctacagagtgttcccctacagcgtgttctacgtgttctacgagcagtacctgaccatcatcgacgacaccatcttcaacctgggcgtgagcctgggcgccatcttcctggtgaccatggtgctgctgggctgcgagctgtggagcgccgtgatcatgtgcgccaccatcgccatggtgctggtgaacatgttcggcgtgatgtggctgtggggcatcagcctgaacgccgtgagcctggtgaacctggtgatgagctgcggcatcagcgtggagttctgcagccacatcaccagagccttcaccgtgagcatgaagggcagcagagtggagagagccgaggaggccctggcccacatgggcagcagcgtgttcagcggcatcaccctgaccaagttcggcggcatcgtggtgctggccttcgccaagagccagatcttccagatcttctacttcagaatgtacctggccatggtgctgctgggcgccacccacggcctgatcttcctgcccgtgctgctgagctacatcggccccagcgtgaacaaggccaagagctgcgccaccgaggagagatacaagggcaccgagagagagagactgctgaacttctga

SEQ ID NO: 1750 - DNA, 3837 bp, Artificial Sequence
  source: /note="Description of Artificial Sequence: Synthetic polynucleotide"
atgaccgccaggggcctggccctgggactgctgctgctgctgctgtgcccagcccaggtgttctctcagagctgcgtgtggtatggcgagtgtggcatcgcctacggcgacaagcggtacaactgcgagtacagcggaccacctaagccactgccaaaggacggctacgatctggtgcaggagctgtgccctggcttctttttcggcaacgtgtccctgtgctgtgacgtgcggcagctgcagaccctgaaggataatctgcagctgcctctgcagtttctgtctagatgcccaagctgtttttataacctgctgaatctgttctgcgagctgacctgttccccaaggcagtctcagttcctgaacgtgaccgccacagaggactacgtggatcccgtgacaaaccagaccaagacaaatgtgaaggagctgcagtactatgtgggccagagcttcgccaacgccatgtataatgcatgcagggacgtggaggcacccagctccaatgataaggccctgggactgctgtgcggcaaggacgcagatgcctgtaacgccaccaattggatcgagtacatgtttaacaaggataatggccaggcccctttcaccatcacaccagtgttttccgacttccccgtgcacggcatggagcctatgaacaatgccaccaagggctgcgacgagtctgtggatgaggtgacagccccttgcagctgtcaggattgctccatcgtgtgcggacctaagccacagccaccacctccaccagcaccatggaccatcctgggactggacgccatgtatgtgatcatgtggatcacatacatggcctttctgctggtgtttttcggcgcctttttcgccgtgtggtgctatcggaagagatacttcgtgagcgagtacacccccatcgacagcaacatcgccttcagcgtgaatgcctccgacaagggcgaggcatcctgctgtgatcccgtgagcgccgccttcgagggatgcctgcggagactgtttacccggtggggctctttctgcgtgagaaacccaggctgcgtgatctttttcagcctggtgtttatcacagcctgttctagcggcctggtgttcgtgagggtgaccacaaatccagtggatctgtggagcgccccctcctctcaggcaaggctggagaaggagtactttgaccagcacttcggcccatttttcaggaccgagcagctgatcatcagggcaccactgacagataagcacatctaccagccatatcctagcggagcagacgtgcccttcggccctccactggatatccagatcctgcaccaggtgctggacctgcagatcgccatcgagaacatcaccgcctcctatgacaatgagaccgtgacactgcaggatatctgcctggcccctctgagcccatataacaccaattgtacaatcctgtccgtgctgaactactttcagaattcccactctgtgctggatcacaagaagggcgacgacttcttcgtgtacgccgactatcacacccacttcctgtactgcgtgcgggcccctgcctctctgaacgacaccagcctgctgcacgatccatgtctgggcacatttggcggccccgtgttcccttggctggtgctgggcggctatgacgatcagaactacaacaatgccaccgccctggtcatcaccttccctgtgaacaattactataatgataccgagaagctgcagagagcccaggcctgggagaaggagtttatcaacttcgtgaagaattacaagaacccaaatctgaccatcagcttcacagccgagcggtccatcgaggacgagctgaacagagagagcgactccgacgtgttcaccgtggtcatcagctatgccatcatgttcctgtacatcagcctggccctgggccacatcaagtcctgcaggcgcctgctggtggatagcaaggtgtccctgggcatcgccggcatcctgatcgtgctgagctccgtggcctgttccctgggcgtgttctcttatatcggcctgcctctgaccctgatcgtgatcgaagtgatcccatttctggtgctggccgtgggcgtggacaatatcttcatcctggtgcaggcataccagagggacgagcgcctgcagggagagacactggatcagcagctgggaagggtgctgggagaggtggcaccatccatgtttctgtctagcttctctgagaccgtggcctttttcctgggcgccctgtccgtgatgccagcagtgcacacattttctctgttcgccggcctggccgtgtttatcgacttcctgctgcagatcacctgcttcgtgagcctgctgggcctggacatcaagaggcaggagaagaaccgcctggatatcttctgctgcgtgcggggagcagaggacggcacatccgtgcaggcctctgagagctgtctgttccggtttttcaagaattcctattctccactgctgctgaaggactggatgagacccatcgtgatcgccatctttgtgggcgtgctgagcttctccatcgccgtgctgaacaaggtggacatcggcctggatcagtctctgagcatgcccgacgatagctatatggtggattactttaagtccatctctcagtatctgcacgcaggaccccccgtgtacttcgtgctggaggagggccacgactacacctcctctaagggccagaatatggtgtgcggcggcatgggctgtaacaatgattccctggtgcagcagatcttcaacgccgcccagctggacaattatacacggatcggctttgcccccagctcctggatcgacgattacttcgattgggtgaagcctcagtctagctgctgtagagtggacaacatcaccgatcagttttgcaatgcaagcgtggtggaccctgcatgcgtgaggtgtaggccactgacaccagagggcaagcagaggccacagggaggcgacttcatgcgcttcctgcctatgttcctgtccgacaacccaaatccaaagtgtggcaagggaggacacgcagcatactcctctgccgtgaacatcctgctgggacacggaaccagggtgggagccacatacttcatgacctaccacacagtgctgcagacctccgccgacttcatcgatgccctgaagaaggccaggctgatcgcctctaacgtgaccgagacaatgggcatcaatggctctgcctatcgcgtgtttccctacagcgtgttttacgtgttctatgagcagtacctgaccatcatcgacgatacaatctttaacctgggcgtgagcctgggcgccatcttcctggtgaccatggtgctgctgggatgcgagctgtggtccgccgtgatcatgtgcgccacaatcgccatggtgctggtgaatatgttcggcgtgatgtggctgtggggcatcagcctgaacgccgtgtccctggtgaacctggtcatgtcttgcggcatcagcgtggagttttgtagccacatcaccagagccttcacagtgtccatgaagggctctcgggtggagagagcagaggaggccctggcacacatgggcagctccgtgttttctggcatcaccctgacaaagttcggcggcatcgtggtgctggcctttgccaagagccagatcttccagatcttttatttccggatgtacctggcaatggtgctgctgggagcaacccacggcctgatctttctgcccgtgctgctgtcttatatcggccctagcgtgaacaaggccaagtcctgcgccaccgaggagagatacaagggcacagagcgggagagactgctgaatttctga

SEQ ID NO: 1751 - DNA, 127 bp, Artificial Sequence
  source: /note="Description of Artificial Sequence: Synthetic polynucleotide"
gatctttttccctctgccaaaaattatggggacatcatgaagccccttgagcatctgacttctggctaataaaggaaatttattttcattgcaatagtgtgttggaattttttgtgtctctcactcg

SEQ ID NO: 1752 - DNA, 4629 bp, Artificial Sequence
  source: /note="Description of Artificial Sequence: Synthetic polynucleotide"
ctgcgcgctcgctcgctcactgaggccgcccgggcaaagcccgggcgtcgggcgacctttggtcgcccggcctcagtgagcgagcgagcgcgcagagagggagtggccaactccatcactaggggttccttgtagttaatgattaacccgccatgctacttatctaccagggtaatggggatcctctagaactatagctaacgcgtgctattaccatggtgatgcggttttggcagtacatcaatgggcgtggatagcggtttgactcacggggatttccaagtctccaccccattgacgtcaatgggagtttgttttggcaccaaaatcaacgggactttccaaaatgtcgtaacaactccgccccattgacgcaaatgggcggtaggcgtgtacggtgggaggtctatataagcagagctccgggagcaagcttcgtttcgaaccggtgccgccaccatgaccgctcgcggcctggcccttggcctcctcctgctgctactgtgtccagcgcaggtgttttcacagtcctgtgtttggtatggagagtgtggaattgcatatggggacaagaggtacaattgcgaatattctggcccaccaaaaccattgccaaaggatggatatgacttagtgcaggaactctgtccaggattcttctttggcaatgtcagtctctgttgtgatgttcggcagcttcagacactaaaagacaacctgcagctgcctctacagtttctgtccagatgtccatcctgtttttataacctactgaacctgttttgtgagctgacatgtagccctcgacagagtcagtttttgaatgttacagctactgaagattatgttgatcctgttacaaaccagacgaaaacaaatgtgaaagagttacaatactacgtcggacagagttttgccaatgcaatgtacaatgcctgccgggatgtggaggccccctcaagtaatgacaaggccctgggactcctgtgtgggaaggacgctgacgcctgtaatgccaccaactggattgaatacatgttcaataaggacaatggacaggcaccttttaccatcactcctgtgttttcagattttccagtccatgggatggagcccatgaacaatgccaccaaaggctgtgacgagtctgtggatgaggtcacagcaccatgtagctgccaagactgctctattgtctgtggccccaagccccagcccccacctcctcctgctccctggacgatccttggcttggacgccatgtatgtcatcatgtggatcacctacatggcgtttttgcttgtgttttttggagcattttttgcagtgtggtgctacagaaaacggtattttgtctccgagtacactcccatcgatagcaatatagctttttctgttaatgcaagtgacaaaggagaggcgtcctgctgtgaccctgtcagcgcagcatttgagggctgcttgaggcggctgttcacacgctgggggtctttctgcgtccgaaaccctggctgtgtcattttcttctcgctggtcttcattactgcgtgttcgtcaggcctggtgtttgtccgggtcacaaccaatccagttgacctctggtcagcccccagcagccaggctcgcctggaaaaagagtactttgaccagcactttgggcctttcttccggacggagcagctcatcatccgggcccctctcactgacaaacacatttaccagccatacccttcgggagctgatgtaccctttggacctccgcttgacatacagatactgcaccaggttcttgacttacaaatagccatcgaaaacattactgcctcttatgacaatgagactgtgacacttcaagacatctgcttggcccctctttcaccgtataacacgaactgcaccattttgagtgtgttaaattacttccagaacagccattccgtgctggaccacaagaaaggggacgacttctttgtgtatgccgattaccacacgcactttctgtactgcgtacgggctcctgcctctctgaatgatacaagtttgctccatgacccttgtctgggtacgtttggtggaccagtgttcccgtggcttgtgttgggaggctatgatgatcaaaactacaataacgccactgcccttgtgattaccttccctgtcaataattactataatgatacagagaagctccagagggcccaggcctgggaaaaagagtttattaattttgtgaaaaactacaagaatcccaatctgaccatttccttcactgctgaacgaagtattgaagatgaactaaatcgtgaaagtgacagtgatgtcttcaccgttgtaattagctatgccatcatgtttctatatatttccctagccttggggcacatcaaaagctgtcgcaggcttctggtggattcgaaggtctcactaggcatcgcgggcatcttgatcgtgctgagctcggtggcttgctccttgggtgtcttcagctacattgggttgcccttgaccctcattgtgattgaagtcatcccgttcctggtgctggctgttggagtggacaacatcttcattctggtgcaggcctaccagagagatgaacgtcttcaaggggaaaccctggatcagcagctgggcagggtcctaggagaagtggctcccagtatgttcctgtcatccttttctgagactgtagcatttttcttaggagcattgtccgtgatgccagccgtgcacaccttctctctctttgcgggattggcagtcttcattgactttcttctgcagattacctgtttcgtgagtctcttggggttagacattaaacgtcaagagaaaaatcggctagacatcttttgctgtgtcagaggtgctgaagatggaacaagcgtccaggcctcagagagctgtttgtttcgcttcttcaaaaactcctattctccacttctgctaaaggactggatgagaccaattgtgatagcaatatttgtgggtgttctgtcattcagcatcgcagtcctgaacaaagtagatattggattggatcagtctctttcgatgccagatgactcctacatggtggattatttcaaatccatcagtcagtacctgcatgcgggtccgcctgtgtactttgtcctggaggaagggcacgactacacttcttccaaggggcagaacatggtgtgcggcggcatgggctgcaacaatgattccctggtgcagcagatatttaacgcggcgcagctggacaactatacccgaataggcttcgccccctcgtcctggatcgacgattatttcgactgggtgaagccacagtcgtcttgctgtcgagtggacaatatcactgaccagttctgcaatgcttcagtggttgaccctgcctgcgttcgctgcaggcctctgactccggaaggcaaacagaggcctcaggggggagacttcatgagattcctgcccatgttcctttcggataaccctaaccccaagtgtggcaaagggggacatgctgcctatagttctgcagttaacatcctccttggccatggcaccagggtcggagccacgtacttcatgacctaccacaccgtgctgcagacctctgctgactttattgacgctctgaagaaagcccgacttatagccagtaatgtcaccgaaaccatgggcattaacggcagtgcctaccgagtatttccttacagtgtgttttatgtcttctacgaacagtacctgaccatcattgacgacactatcttcaacctcggtgtgtccctgggcgcgatatttctggtgaccatggtcctcctgggctgtgagctctggtctgcagtcatcatgtgtgccaccatcgccatggtcttggtcaacatgtttggagttatgtggctctggggcatcagtctgaacgctgtatccttggtcaacctggtgatgagctgtggcatctccgtggagttctgcagccacataaccagagcgttcacggtgagcatgaaaggcagccgcgtggagcgcgcggaagaggcacttgcccacatgggcagctccgtgttcagtggaatcacacttacaaaatttggagggattgtggtgttggcttttgccaaatctcaaattttccagatattctacttcaggatgtatttggccatggtcttactgggagccactcacggattaatatttctccctgtcttactcagttacatagggccatcagtaaataaagccaaaagttgtgccactgaagagcgatacaaaggaacagagcgcgaacggcttctaaatttctagctcgaggacggggtgaactacgcctgaggatccgatctttttccctctgccaaaaattatggggacatcatgaagccccttgagcatctgacttctggctaataaaggaaatttattttcattgcaatagtgtgttggaattttttgtgtctctcactcggcctaggtagataagtagcatggcgggttaatcattaactacaaggaacccctagtgatggagttggccactccctctctgcgcgctcgctcgctcactgaggccgggcgaccaaaggtcgcccgacgcccgggctttgcccgggcggcctcagtgagcgagcgagcgcgcag

SEQ ID NO: 1753 - DNA, 4639 bp, Artificial Sequence
  source: /note="Description of Artificial Sequence: Synthetic polynucleotide"
ctgcgcgctcgctcgctcactgaggccgcccgggcaaagcccgggcgtcgggcgacctttggtcgcccggcctcagtgagcgagcgagcgcgcagagagggagtggccaactccatcactaggggttccttgtagttaatgattaacccgccatgctacttatctaccagggtaatggggatcctctagaactatagctaacgcgtgcccgtcagtgggcagagcgcacatcgcccacagtccccgagaagttggggggaggggtcggcaattgaaccggtgcctagagaaggtggcgcggggtaaactgggaaagtgatgtcgtgtactggctccgcctttttcccgagggtgggggagaaccgtatataagtgcagtagtcgccgtgaacgttctttttcgcaacgggtttgccgccagaacacgcgtaagcgggagcaagcttcgtttcgaaccggtgccgccaccatgaccgctcgcggcctggcccttggcctcctcctgctgctactgtgtccagcgcaggtgttttcacagtcctgtgtttggtatggagagtgtggaattgcatatggggacaagaggtacaattgcgaatattctggcccaccaaaaccattgccaaaggatggatatgacttagtgcaggaactctgtccaggattcttctttggcaatgtcagtctctgttgtgatgttcggcagcttcagacactaaaagacaacctgcagctgcctctacagtttctgtccagatgtccatcctgtttttataacctactgaacctgttttgtgagctgacatgtagccctcgacagagtcagtttttgaatgttacagctactgaagattatgttgatcctgttacaaaccagacgaaaacaaatgtgaaagagttacaatactacgtcggacagagttttgccaatgcaatgtacaatgcctgccgggatgtggaggccccctcaagtaatgacaaggccctgggactcctgtgtgggaaggacgctgacgcctgtaatgccaccaactggattgaatacatgttcaataaggacaatggacaggcaccttttaccatcactcctgtgttttcagattttccagtccatgggatggagcccatgaacaatgccaccaaaggctgtgacgagtctgtggatgaggtcacagcaccatgtagctgccaagactgctctattgtctgtggccccaagccccagcccccacctcctcctgctccctggacgatccttggcttggacgccatgtatgtcatcatgtggatcacctacatggcgtttttgcttgtgttttttggagcattttttgcagtgtggtgctacagaaaacggtattttgtctccgagtacactcccatcgatagcaatatagctttttctgttaatgcaagtgacaaaggagaggcgtcctgctgtgaccctgtcagcgcagcatttgagggctgcttgaggcggctgttcacacgctgggggtctttctgcgtccgaaaccctggctgtgtcattttcttctcgctggtcttcattactgcgtgttcgtcaggcctggtgtttgtccgggtcacaaccaatccagttgacctctggtcagcccccagcagccaggctcgcctggaaaaagagtactttgaccagcactttgggcctttcttccggacggagcagctcatcatccgggcccctctcactgacaaacacatttaccagccatacccttcgggagctgatgtaccctttggacctccgcttgacatacagatactgcaccaggttcttgacttacaaatagccatcgaaaacattactgcctcttatgacaatgagactgtgacacttcaagacatctgcttggcccctctttcaccgtataacacgaactgcaccattttgagtgtgttaaattacttccagaacagccattccgtgctggaccacaagaaaggggacgacttctttgtgtatgccgattaccacacgcactttctgtactgcgtacgggctcctgcctctctgaatgatacaagtttgctccatgacccttgtctgggtacgtttggtggaccagtgttcccgtggcttgtgttgggaggctatgatgatcaaaactacaataacgccactgcccttgtgattaccttccctgtcaataattactataatgatacagagaagctccagagggcccaggcctgggaaaaagagtttattaattttgtgaaaaactacaagaatcccaatctgaccatttccttcactgctgaacgaagtattgaagatgaactaaatcgtgaaagtgacagtgatgtcttcaccgttgtaattagctatgccatcatgtttctatatatttccctagccttggggcacatcaaaagctgtcgcaggcttctggtggattcgaaggtctcactaggcatcgcgggcatcttgatcgtgctgagctcggtggcttgctccttgggtgtcttcagctacattgggttgcccttgaccctcattgtgattgaagtcatcccgttcctggtgctggctgttggagtggacaacatcttcattctggtgcaggcctaccagagagatgaacgtcttcaaggggaaaccctggatcagcagctgggcagggtcctaggagaagtggctcccagtatgttcctgtcatccttttctgagactgtagcatttttcttaggagcattgtccgtgatgccagccgtgcacaccttctctctctttgcgggattggcagtcttcattgactttcttctgcagattacctgtttcgtgagtctcttggggttagacattaaacgtcaagagaaaaatcggctagacatcttttgctgtgtcagaggtgctgaagatggaacaagcgtccaggcctcagagagctgtttgtttcgcttcttcaaaaactcctattctccacttctgctaaaggactggatgagaccaattgtgatagcaatatttgtgggtgttctgtcattcagcatcgcagtcctgaacaaagtagatattggattggatcagtctctttcgatgccagatgactcctacatggtggattatttcaaatccatcagtcagtacctgcatgcgggtccgcctgtgtactttgtcctggaggaagggcacgactacacttcttccaaggggcagaacatggtgtgcggcggcatgggctgcaacaatgattccctggtgcagcagatatttaacgcggcgcagctggacaactatacccgaataggcttcgccccctcgtcctggatcgacgattatttcgactgggtgaagccacagtcgtcttgctgtcgagtggacaatatcactgaccagttctgcaatgcttcagtggttgaccctgcctgcgttcgctgcaggcctctgactccggaaggcaaacagaggcctcaggggggagacttcatgagattcctgcccatgttcctttcggataaccctaaccccaagtgtggcaaagggggacatgctgcctatagttctgcagttaacatcctccttggccatggcaccagggtcggagccacgtacttcatgacctaccacaccgtgctgcagacctctgctgactttattgacgctctgaagaaagcccgacttatagccagtaatgtcaccgaaaccatgggcattaacggcagtgcctaccgagtatttccttacagtgtgttttatgtcttctacgaacagtacctgaccatcattgacgacactatcttcaacctcggtgtgtccctgggcgcgatatttctggtgaccatggtcctcctgggctgtgagctctggtctgcagtcatcatgtgtgccaccatcgccatggtcttggtcaacatgtttggagttatgtggctctggggcatcagtctgaacgctgtatccttggtcaacctggtgatgagctgtggcatctccgtggagttctgcagccacataaccagagcgttcacggtgagcatgaaaggcagccgcgtggagcgcgcggaagaggcacttgcccacatgggcagctccgtgttcagtggaatcacacttacaaaatttggagggattgtggtgttggcttttgccaaatctcaaattttccagatattctacttcaggatgtatttggccatggtcttactgggagccactcacggattaatatttctccctgtcttactcagttacatagggccatcagtaaataaagccaaaagttgtgccactgaagagcgatacaaaggaacagagcgcgaacggcttctaaatttctagctcgaggacggggtgaactacgcctgaggatccgatctttttccctctgccaaaaattatggggacatcatgaagccccttgagcatctgacttctggctaataaaggaaatttattttcattgcaatagtgtgttggaattttttgtgtctctcactcggcctaggtagataagtagcatggcgggttaatcattaactacaaggaacccctagtgatggagttggccactccctctctgcgcgctcgctcgctcactgaggccgggcgaccaaaggtcgcccgacgcccgggctttgcccgggcggcctcagtgagcgagcgagcgcgcag

SEQ ID NO: 1754 - DNA, 4787 bp, Artificial Sequence
  source: /note="Description of Artificial Sequence: Synthetic polynucleotide"
ctgcgcgctcgctcgctcactgaggccgcccgggcaaagcccgggcgtcgggcgacctttggtcgcccggcctcagtgagcgagcgagcgcgcagagagggagtggccaactccatcactaggggttccttgtagttaatgattaacccgccatgctacttatctaccagggtaatggggatcctctagaactatagctaacgcgtgcccgtcagtgggcagagcgcacatcgcccacagtccccgagaagttggggggaggggtcggcaattgaaccggtgcctagagaaggtggcgcggggtaaactgggaaagtgatgtcgtgtactggctccgcctttttcccgagggtgggggagaaccgtatataagtgcagtagtcgccgtgaacgttctttttcgcaacgggtttgccgccagaacacgcgtaagcgggagcaagcttcgtttagtgaaccggtaagtatcaaggttacaagacaggtttaaggagaccaatagaaactgggcttgtcgagacagagaagactcttgcgtttctgataggcacctattggtcttactgacatccactttgcctttctctccacaggggattcgaaccggtgccgccaccatgaccgctcgcggcctggcccttggcctcctcctgctgctactgtgtccagcgcaggtgttttcacagtcctgtgtttggtatggagagtgtggaattgcatatggggacaagaggtacaattgcgaatattctggcccaccaaaaccattgccaaaggatggatatgacttagtgcaggaactctgtccaggattcttctttggcaatgtcagtctctgttgtgatgttcggcagcttcagacactaaaagacaacctgcagctgcctctacagtttctgtccagatgtccatcctgtttttataacctactgaacctgttttgtgagctgacatgtagccctcgacagagtcagtttttgaatgttacagctactgaagattatgttgatcctgttacaaaccagacgaaaacaaatgtgaaagagttacaatactacgtcggacagagttttgccaatgcaatgtacaatgcctgccgggatgtggaggccccctcaagtaatgacaaggccctgggactcctgtgtgggaaggacgctgacgcctgtaatgccaccaactggattgaatacatgttcaataaggacaatggacaggcaccttttaccatcactcctgtgttttcagattttccagtccatgggatggagcccatgaacaatgccaccaaaggctgtgacgagtctgtggatgaggtcacagcaccatgtagctgccaagactgctctattgtctgtggccccaagccccagcccccacctcctcctgctccctggacgatccttggcttggacgccatgtatgtcatcatgtggatcacctacatggcgtttttgcttgtgttttttggagcattttttgcagtgtggtgctacagaaaacggtattttgtctccgagtacactcccatcgatagcaatatagctttttctgttaatgcaagtgacaaaggagaggcgtcctgctgtgaccctgtcagcgcagcatttgagggctgcttgaggcggctgttcacacgctgggggtctttctgcgtccgaaaccctggctgtgtcattttcttctcgctggtcttcattactgcgtgttcgtcaggcctggtgtttgtccgggtcacaaccaatccagttgacctctggtcagcccccagcagccaggctcgcctggaaaaagagtactttgaccagcactttgggcctttcttccggacggagcagctcatcatccgggcccctctcactgacaaacacatttaccagccatacccttcgggagctgatgtaccctttggacctccgcttgacatacagatactgcaccaggttcttgacttacaaatagccatcgaaaacattactgcctcttatgacaatgagactgtgacacttcaagacatctgcttggcccctctttcaccgtataacacgaactgcaccattttgagtgtgttaaattacttccagaacagccattccgtgctggaccacaagaaaggggacgacttctttgtgtatgccgattaccacacgcactttctgtactgcgtacgggctcctgcctctctgaatgatacaagtttgctccatgacccttgtctgggtacgtttggtggaccagtgttcccgtggcttgtgttgggaggctatgatgatcaaaactacaataacgccactgcccttgtgattaccttccctgtcaataattactataatgatacagagaagctccagagggcccaggcctgggaaaaagagtttattaattttgtgaaaaactacaagaatcccaatctgaccatttccttcactgctgaacgaagtattgaagatgaactaaatcgtgaaagtgacagtgatgtcttcaccgttgtaattagctatgccatcatgtttctatatatttccctagccttggggcacatcaaaagctgtcgcaggcttctggtggattcgaaggtctcactaggcatcgcgggcatcttgatcgtgctgagctcggtggcttgctccttgggtgtcttcagctacattgggttgcccttgaccctcattgtgattgaagtcatcccgttcctggtgctggctgttggagtggacaacatcttcattctggtgcaggcctaccagagagatgaacgtcttcaaggggaaaccctggatcagcagctgggcagggtcctaggagaagtggctcccagtatgttcctgtcatccttttctgagactgtagcatttttcttaggagcattgtccgtgatgccagccgtgcacaccttctctctctttgcgggattggcagtcttcattgactttcttctgcagattacctgtttcgtgagtctcttggggttagacattaaacgtcaagagaaaaatcggctagacatcttttgctgtgtcagaggtgctgaagatggaacaagcgtccaggcctcagagagctgtttgtttcgcttcttcaaaaactcctattctccacttctgctaaaggactggatgagaccaattgtgatagcaatatttgtgggtgttctgtcattcagcatcgcagtcctgaacaaagtagatattggattggatcagtctctttcgatgccagatgactcctacatggtggattatttcaaatccatcagtcagtacctgcatgcgggtccgcctgtgtactttgtcctggaggaagggcacgactacacttcttccaaggggcagaacatggtgtgcggcggcatgggctgcaacaatgattccctggtgcagcagatatttaacgcggcgcagctggacaactatacccgaataggcttcgccccctcgtcctggatcgacgattatttcgactgggtgaagccacagtcgtcttgctgtcgagtggacaatatcactgaccagttctgcaatgcttcagtggttgaccctgcctgcgttcgctgcaggcctctgactccggaaggcaaacagaggcctcaggggggagacttcatgagattcctgcccatgttcctttcggataaccctaaccccaagtgtggcaaagggggacatgctgcctatagttctgcagttaacatcctccttggccatggcaccagggtcggagccacgtacttcatgacctaccacaccgtgctgcagacctctgctgactttattgacgctctgaagaaagcccgacttatagccagtaatgtcaccgaaaccatgggcattaacggcagtgcctaccgagtatttccttacagtgtgttttatgtcttctacgaacagtacctgaccatcattgacgacactatcttcaacctcggtgtgtccctgggcgcgatatttctggtgaccatggtcctcctgggctgtgagctctggtctgcagtcatcatgtgtgccaccatcgccatggtcttggtcaacatgtttggagttatgtggctctggggcatcagtctgaacgctgtatccttggtcaacctggtgatgagctgtggcatctccgtggagttctgcagccacataaccagagcgttcacggtgagcatgaaaggcagccgcgtggagcgcgcggaagaggcacttgcccacatgggcagctccgtgttcagtggaatcacacttacaaaatttggagggattgtggtgttggcttttgccaaatctcaaattttccagatattctacttcaggatgtatttggccatggtcttactgggagccactcacggattaatatttctccctgtcttactcagttacatagggccatcagtaaataaagccaaaagttgtgccactgaagagcgatacaaaggaacagagcgcgaacggcttctaaatttctagctcgaggacggggtgaactacgcctgaggatccgatctttttccctctgccaaaaattatggggacatcatgaagccccttgagcatctgacttctggctaataaaggaaatttattttcattgcaatagtgtgttggaattttttgtgtctctcactcggcctaggtagataagtagcatggcgggttaatcattaactacaaggaacccctagtgatggagttggccactccctctctgcgcgctcgctcgctcactgaggccgggcgaccaaaggtcgcccgacgcccgggctttgcccgggcggcctcagtgagcgagcgagcgcgcag

SEQ ID NO: 1755 - DNA, 4639 bp, Artificial Sequence
  source: /note="Description of Artificial Sequence: Synthetic polynucleotide"
ctgcgcgctcgctcgctcactgaggccgcccgggcaaagcccgggcgtcgggcgacctttggtcgcccggcctcagtgagcgagcgagcgcgcagagagggagtggccaactccatcactaggggttccttgtagttaatgattaacccgccatgctacttatctaccagggtaatggggatcctctagaactatagctaacgcgtgcccgtcagtgggcagagcgcacatcgcccacagtccccgagaagttggggggaggggtcggcaattgaaccggtgcctagagaaggtggcgcggggtaaactgggaaagtgatgtcgtgtactggctccgcctttttcccgagggtgggggagaaccgtatataagtgcagtagtcgccgtgaacgttctttttcgcaacgggtttgccgccagaacacgcgtaagcgggagcaagcttcgtttcgaaccggtgccgccaccatgaccgccaggggcctggccctgggactgctgctgctgctgctgtgcccagcccaggtgttctctcagagctgcgtgtggtatggcgagtgtggcatcgcctacggcgacaagcggtacaactgcgagtacagcggaccacctaagccactgccaaaggacggctacgatctggtgcaggagctgtgccctggcttctttttcggcaacgtgtccctgtgctgtgacgtgcggcagctgcagaccctgaaggataatctgcagctgcctctgcagtttctgtctagatgcccaagctgtttttataacctgctgaatctgttctgcgagctgacctgttccccaaggcagtctcagttcctgaacgtgaccgccacagaggactacgtggatcccgtgacaaaccagaccaagacaaatgtgaaggagctgcagtactatgtgggccagagcttcgccaacgccatgtataatgcatgcagggacgtggaggcacccagctccaatgataaggccctgggactgctgtgcggcaaggacgcagatgcctgtaacgccaccaattggatcgagtacatgtttaacaaggataatggccaggcccctttcaccatcacaccagtgttttccgacttccccgtgcacggcatggagcctatgaacaatgccaccaagggctgcgacgagtctgtggatgaggtgacagccccttgcagctgtcaggattgctccatcgtgtgcggacctaagccacagccaccacctccaccagcaccatggaccatcctgggactggacgccatgtatgtgatcatgtggatcacatacatggcctttctgctggtgtttttcggcgcctttttcgccgtgtggtgctatcggaagagatacttcgtgagcgagtacacccccatcgacagcaacatcgccttcagcgtgaatgcctccgacaagggcgaggcatcctgctgtgatcccgtgagcgccgccttcgagggatgcctgcggagactgtttacccggtggggctctttctgcgtgagaaacccaggctgcgtgatctttttcagcctggtgtttatcacagcctgttctagcggcctggtgttcgtgagggtgaccacaaatccagtggatctgtggagcgccccctcctctcaggcaaggctggagaaggagtactttgaccagcacttcggcccatttttcaggaccgagcagctgatcatcagggcaccactgacagataagcacatctaccagccatatcctagcggagcagacgtgcccttcggccctccactggatatccagatcctgcaccaggtgctggacctgcagatcgccatcgagaacatcaccgcctcctatgacaatgagaccgtgacactgcaggatatctgcctggcccctctgagcccatataacaccaattgtacaatcctgtccgtgctgaactactttcagaattcccactctgtgctggatcacaagaagggcgacgacttcttcgtgtacgccgactatcacacccacttcctgtactgcgtgcgggcccctgcctctctgaacgacaccagcctgctgcacgatccatgtctgggcacatttggcggccccgtgttcccttggctggtgctgggcggctatgacgatcagaactacaacaatgccaccgccctggtcatcaccttccctgtgaacaattactataatgataccgagaagctgcagagagcccaggcctgggagaaggagtttatcaacttcgtgaagaattacaagaacccaaatctgaccatcagcttcacagccgagcggtccatcgaggacgagctgaacagagagagcgactccgacgtgttcaccgtggtcatcagctatgccatcatgttcctgtacatcagcctggccctgggccacatcaagtcctgcaggcgcctgctggtggatagcaaggtgtccctgggcatcgccggcatcctgatcgtgctgagctccgtggcctgttccctgggcgtgttctcttatatcggcctgcctctgaccctgatcgtgatcgaagtgatcccatttctggtgctggccgtgggcgtggacaatatcttcatcctggtgcaggcataccagagggacgagcgcctgcagggagagacactggatcagcagctgggaagggtgctgggagaggtggcaccatccatgtttctgtctagcttctctgagaccgtggcctttttcctgggcgccctgtccgtgatgccagcagtgcacacattttctctgttcgccggcctggccgtgtttatcgacttcctgctgcagatcacctgcttcgtgagcctgctgggcctggacatcaagaggcaggagaagaaccgcctggatatcttctgctgcgtgcggggagcagaggacggcacatccgtgcaggcctctgagagctgtctgttccggtttttcaagaattcctattctccactgctgctgaaggactggatgagacccatcgtgatcgccatctttgtgggcgtgctgagcttctccatcgccgtgctgaacaaggtggacatcggcctggatcagtctctgagcatgcccgacgatagctatatggtggattactttaagtccatctctcagtatctgcacgcaggaccccccgtgtacttcgtgctggaggagggccacgactacacctcctctaagggccagaatatggtgtgcggcggcatgggctgtaacaatgattccctggtgcagcagatcttcaacgccgcccagctggacaattatacacggatcggctttgcccccagctcctggatcgacgattacttcgattgggtgaagcctcagtctagctgctgtagagtggacaacatcaccgatcagttttgcaatgcaagcgtggtggaccctgcatgcgtgaggtgtaggccactgacaccagagggcaagcagaggccacagggaggcgacttcatgcgcttcctgcctatgttcctgtccgacaacccaaatccaaagtgtggcaagggaggacacgcagcatactcctctgccgtgaacatcctgctgggacacggaaccagggtgggagccacatacttcatgacctaccacacagtgctgcagacctccgccgacttcatcgatgccctgaagaaggccaggctgatcgcctctaacgtgaccgagacaatgggcatcaatggctctgcctatcgcgtgtttccctacagcgtgttttacgtgttctatgagcagtacctgaccatcatcgacgatacaatctttaacctgggcgtgagcctgggcgccatcttcctggtgaccatggtgctgctgggatgcgagctgtggtccgccgtgatcatgtgcgccacaatcgccatggtgctggtgaatatgttcggcgtgatgtggctgtggggcatcagcctgaacgccgtgtccctggtgaacctggtcatgtcttgcggcatcagcgtggagttttgtagccacatcaccagagccttcacagtgtccatgaagggctctcgggtggagagagcagaggaggccctggcacacatgggcagctccgtgttttctggcatcaccctgacaaagttcggcggcatcgtggtgctggcctttgccaagagccagatcttccagatcttttatttccggatgtacctggcaatggtgctgctgggagcaacccacggcctgatctttctgcccgtgctgctgtcttatatcggccctagcgtgaacaaggccaagtcctgcgccaccgaggagagatacaagggcacagagcgggagagactgctgaatttctgactcgaggacggggtgaactacgcctgaggatccgatctttttccctctgccaaaaattatggggacatcatgaagccccttgagcatctgacttctggctaataaaggaaatttattttcattgcaatagtgtgttggaattttttgtgtctctcactcggcctaggtagataagtagcatggcgggttaatcattaactacaaggaacccctagtgatggagttggccactccctctctgcgcgctcgctcgctcactgaggccgggcgaccaaaggtcgcccgacgcccgggctttgcccgggcggcctcagtgagcgagcgagcgcgcag

SEQ ID NO: 1756 - DNA, 4773 bp, Artificial Sequence
  source: /note="Description of Artificial Sequence: Synthetic polynucleotide"
ctgcgcgctcgctcgctcactgaggccgcccgggcaaagcccgggcgtcgggcgacctttggtcgcccggcctcagtgagcgagcgagcgcgcagagagggagtggccaactccatcactaggggttccttgtagttaatgattaacccgccatgctacttatctaccagggtaatggggatcctctagaactatagctaacgcgtcacttggcagtacatcaagtgtatcatatgccaagtacgccccctattgacgtcaatgacggtaaatggcccgcctggcattatgcccagtacatgaccttatgggactttcctacttggcagtacatctacgtattagtcatcgctattaccatggtgatgcggttttggcagtacatcaatgggcgtggatagcggtttgactcacggggatttccaagtctccaccccattgacgtcaatgggagtttgttttggcaccaaaatcaacgggactttccaaaatgtcgtaacaactccgccccattgacgcaaatgggcggtaggcgtgtacggtgggaggtctatataagcagagctccgggagcaagcttcgtttcgaaccggtgccgccaccatgaccgctcgcggcctggcccttggcctcctcctgctgctactgtgtccagcgcaggtgttttcacagtcctgtgtttggtatggagagtgtggaattgcatatggggacaagaggtacaattgcgaatattctggcccaccaaaaccattgccaaaggatggatatgacttagtgcaggaactctgtccaggattcttctttggcaatgtcagtctctgttgtgatgttcggcagcttcagacactaaaagacaacctgcagctgcctctacagtttctgtccagatgtccatcctgtttttataacctactgaacctgttttgtgagctgacatgtagccctcgacagagtcagtttttgaatgttacagctactgaagattatgttgatcctgttacaaaccagacgaaaacaaatgtgaaagagttacaatactacgtcggacagagttttgccaatgcaatgtacaatgcctgccgggatgtggaggccccctcaagtaatgacaaggccctgggactcctgtgtgggaaggacgctgacgcctgtaatgccaccaactggattgaatacatgttcaataaggacaatggacaggcaccttttaccatcactcctgtgttttcagattttccagtccatgggatggagcccatgaacaatgccaccaaaggctgtgacgagtctgtggatgaggtcacagcaccatgtagctgccaagactgctctattgtctgtggccccaagccccagcccccacctcctcctgctccctggacgatccttggcttggacgccatgtatgtcatcatgtggatcacctacatggcgtttttgcttgtgttttttggagcattttttgcagtgtggtgctacagaaaacggtattttgtctccgagtacactcccatcgatagcaatatagctttttctgttaatgcaagtgacaaaggagaggcgtcctgctgtgaccctgtcagcgcagcatttgagggctgcttgaggcggctgttcacacgctgggggtctttctgcgtccgaaaccctggctgtgtcattttcttctcgctggtcttcattactgcgtgttcgtcaggcctggtgtttgtccgggtcacaaccaatccagttgacctctggtcagcccccagcagccaggctcgcctggaaaaagagtactttgaccagcactttgggcctttcttccggacggagcagctcatcatccgggcccctctcactgacaaacacatttaccagccatacccttcgggagctgatgtaccctttggacctccgcttgacatacagatactgcaccaggttcttgacttacaaatagccatcgaaaacattactgcctcttatgacaatgagactgtgacacttcaagacatctgcttggcccctctttcaccgtataacacgaactgcaccattttgagtgtgttaaattacttccagaacagccattccgtgctggaccacaagaaaggggacgacttctttgtgtatgccgattaccacacgcactttctgtactgcgtacgggctcctgcctctctgaatgatacaagtttgctccatgacccttgtctgggtacgtttggtggaccagtgttcccgtggcttgtgttgggaggctatgatgatcaaaactacaataacgccactgcccttgtgattaccttccctgtcaataattactataatgatacagagaagctccagagggcccaggcctgggaaaaagagtttattaattttgtgaaaaactacaagaatcccaatctgaccatttccttcactgctgaacgaagtattgaagatgaactaaatcgtgaaagtgacagtgatgtcttcaccgttgtaattagctatgccatcatgtttctatatatttccctagccttggggcacatcaaaagctgtcgcaggcttctggtggattcgaaggtctcactaggcatcgcgggcatcttgatcgtgctgagctcggtggcttgctccttgggtgtcttcagctacattgggttgcccttgaccctcattgtgattgaagtcatcccgttcctggtgctggctgttggagtggacaacatcttcattctggtgcaggcctaccagagagatgaacgtcttcaaggggaaaccctggatcagcagctgggcagggtcctaggagaagtggctcccagtatgttcctgtcatccttttctgagactgtagcatttttcttaggagcattgtccgtgatgccagccgtgcacaccttctctctctttgcgggattggcagtcttcattgactttcttctgcagattacctgtttcgtgagtctcttggggttagacattaaacgtcaagagaaaaatcggctagacatcttttgctgtgtcagaggtgctgaagatggaacaagcgtccaggcctcagagagctgtttgtttcgcttcttcaaaaactcctattctccacttctgctaaaggactggatgagaccaattgtgatagcaatatttgtgggtgttctgtcattcagcatcgcagtcctgaacaaagtagatattggattggatcagtctctttcgatgccagatgactcctacatggtggattatttcaaatccatcagtcagtacctgcatgcgggtccgcctgtgtactttgtcctggaggaagggcacgactacacttcttccaaggggcagaacatggtgtgcggcggcatgggctgcaacaatgattccctggtgcagcagatatttaacgcggcgcagctggacaactatacccgaataggcttcgccccctcgtcctggatcgacgattatttcgactgggtgaagccacagtcgtcttgctgtcgagtggacaatatcactgaccagttctgcaatgcttcagtggttgaccctgcctgcgttcgctgcaggcctctgactccggaaggcaaacagaggcctcaggggggagacttcatgagattcctgcccatgttcctttcggataaccctaaccccaagtgtggcaaagggggacatgctgcctatagttctgcagttaacatcctccttggccatggcaccagggtcggagccacgtacttcatgacctaccacaccgtgctgcagacctctgctgactttattgacgctctgaagaaagcccgacttatagccagtaatgtcaccgaaaccatgggcattaacggcagtgcctaccgagtatttccttacagtgtgttttatgtcttctacgaacagtacctgaccatcattgacgacactatcttcaacctcggtgtgtccctgggcgcgatatttctggtgaccatggtcctcctgggctgtgagctctggtctgcagtcatcatgtgtgccaccatcgccatggtcttggtcaacatgtttggagttatgtggctctggggcatcagtctgaacgctgtatccttggtcaacctggtgatgagctgtggcatctccgtggagttctgcagccacataaccagagcgttcacggtgagcatgaaaggcagccgcgtggagcgcgcggaagaggcacttgcccacatgggcagctccgtgttcagtggaatcacacttacaaaatttggagggattgtggtgttggcttttgccaaatctcaaattttccagatattctacttcaggatgtatttggccatggtcttactgggagccactcacggattaatatttctccctgtcttactcagttacatagggccatcagtaaataaagccaaaagttgtgccactgaagagcgatacaaaggaacagagcgcgaacggcttctaaatttctagctcgaggacggggtgaactacgcctgaggatccgatctttttccctctgccaaaaattatggggacatcatgaagccccttgagcatctgacttctggctaataaaggaaatttattttcattgcaatagtgtgttggaattttttgtgtctctcactcggcctaggtagataagtagcatggcgggttaatcattaactacaaggaacccctagtgatggagttggccactccctctctgcgcgctcgctcgctcactgaggccgggcgaccaaaggtcgcccgacgcccgggctttgcccgggcggcctcagtgagcgagcgagcgcgcag

SEQ ID NO: 1757 - DNA, 4639 bp, Artificial Sequence
  source: /note="Description of Artificial Sequence: Synthetic polynucleotide"
ctgcgcgctcgctcgctcactgaggccgcccgggcaaagcccgggcgtcgggcgacctttggtcgcccggcctcagtgagcgagcgagcgcgcagagagggagtggccaactccatcactaggggttccttgtagttaatgattaacccgccatgctacttatctaccagggtaatggggatcctctagaactatagctaacgcgtgcccgtcagtgggcagagcgcacatcgcccacagtccccgagaagttggggggaggggtcggcaattgaaccggtgcctagagaaggtggcgcggggtaaactgggaaagtgatgtcgtgtactggctccgcctttttcccgagggtgggggagaaccgtatataagtgcagtagtcgccgtgaacgttctttttcgcaacgggtttgccgccagaacacgcgtaagcgggagcaagcttcgtttcgaaccggtgccgccaccatgaccgccagaggcctggccctgggcctgctgctgctgctgctgtgccccgcccaggtgttcagccagagctgcgtgtggtacggcgagtgcggcatcgcctacggcgacaagagatacaactgcgagtacagcggcccccccaagcccctgcccaaggacggctacgacctggtgcaggagctgtgccccggcttcttcttcggcaacgtgagcctgtgctgcgacgtgagacagctgcagaccctgaaggacaacctgcagctgcccctgcagttcctgagcagatgccccagctgcttctacaacctgctgaacctgttctgcgagctgacctgcagccccagacagagccagttcctgaacgtgaccgccaccgaggactacgtggaccccgtgaccaaccagaccaagaccaacgtgaaggagctgcagtactacgtgggccagagcttcgccaacgccatgtacaacgcctgcagagacgtggaggcccccagcagcaacgacaaggccctgggcctgctgtgcggcaaggacgccgacgcctgcaacgccaccaactggatcgagtacatgttcaacaaggacaacggccaggcccccttcaccatcacccccgtgttcagcgacttccccgtgcacggcatggagcccatgaacaacgccaccaagggctgcgacgagagcgtggacgaggtgaccgccccctgcagctgccaggactgcagcatcgtgtgcggccccaagccccagcccccccccccccccgccccctggaccatcctgggcctggacgccatgtacgtgatcatgtggatcacctacatggccttcctgctggtgttcttcggcgccttcttcgccgtgtggtgctacagaaagagatacttcgtgagcgagtacacccccatcgacagcaacatcgccttcagcgtgaacgccagcgacaagggcgaggccagctgctgcgaccccgtgagcgccgccttcgagggctgcctgagaagactgttcaccagatggggcagcttctgcgtgagaaaccccggctgcgtgatcttcttcagcctggtgttcatcaccgcctgcagcagcggcctggtgttcgtgagagtgaccaccaaccccgtggacctgtggagcgcccccagcagccaggccagactggagaaggagtacttcgaccagcacttcggccccttcttcagaaccgagcagctgatcatcagagcccccctgaccgacaagcacatctaccagccctaccccagcggcgccgacgtgcccttcggcccccccctggacatccagatcctgcaccaggtgctggacctgcagatcgccatcgagaacatcaccgccagctacgacaacgagaccgtgaccctgcaggacatctgcctggcccccctgagcccctacaacaccaactgcaccatcctgagcgtgctgaactacttccagaacagccacagcgtgctggaccacaagaagggcgacgacttcttcgtgtacgccgactaccacacccacttcctgtactgcgtgagagcccccgccagcctgaacgacaccagcctgctgcacgacccctgcctgggcaccttcggcggccccgtgttcccctggctggtgctgggcggctacgacgaccagaactacaacaacgccaccgccctggtgatcaccttccccgtgaacaactactacaacgacaccgagaagctgcagagagcccaggcctgggagaaggagttcatcaacttcgtgaagaactacaagaaccccaacctgaccatcagcttcaccgccgagagaagcatcgaggacgagctgaacagagagagcgacagcgacgtgttcaccgtggtgatcagctacgccatcatgttcctgtacatcagcctggccctgggccacatcaagagctgcagaagactgctggtggacagcaaggtgagcctgggcatcgccggcatcctgatcgtgctgagcagcgtggcctgcagcctgggcgtgttcagctacatcggcctgcccctgaccctgatcgtgatcgaggtgatccccttcctggtgctggccgtgggcgtggacaacatcttcatcctggtgcaggcctaccagagagacgagagactgcagggcgagaccctggaccagcagctgggcagagtgctgggcgaggtggcccccagcatgttcctgagcagcttcagcgagaccgtggccttcttcctgggcgccctgagcgtgatgcccgccgtgcacaccttcagcctgttcgccggcctggccgtgttcatcgacttcctgctgcagatcacctgcttcgtgagcctgctgggcctggacatcaagagacaggagaagaacagactggacatcttctgctgcgtgagaggcgccgaggacggcaccagcgtgcaggccagcgagagctgcctgttcagattcttcaagaacagctacagccccctgctgctgaaggactggatgagacccatcgtgatcgccatcttcgtgggcgtgctgagcttcagcatcgccgtgctgaacaaggtggacatcggcctggaccagagcctgagcatgcccgacgacagctacatggtggactacttcaagagcatcagccagtacctgcacgccggcccccccgtgtacttcgtgctggaggagggccacgactacaccagcagcaagggccagaacatggtgtgcggcggcatgggctgcaacaacgacagcctggtgcagcagatcttcaacgccgcccagctggacaactacaccagaatcggcttcgcccccagcagctggatcgacgactacttcgactgggtgaagccccagagcagctgctgcagagtggacaacatcaccgaccagttctgcaacgccagcgtggtggaccccgcctgcgtgagatgcagacccctgacccccgagggcaagcagagaccccagggcggcgacttcatgagattcctgcccatgttcctgagcgacaaccccaaccccaagtgcggcaagggcggccacgccgcctacagcagcgccgtgaacatcctgctgggccacggcaccagagtgggcgccacctacttcatgacctaccacaccgtgctgcagaccagcgccgacttcatcgacgccctgaagaaggccagactgatcgccagcaacgtgaccgagaccatgggcatcaacggcagcgcctacagagtgttcccctacagcgtgttctacgtgttctacgagcagtacctgaccatcatcgacgacaccatcttcaacctgggcgtgagcctgggcgccatcttcctggtgaccatggtgctgctgggctgcgagctgtggagcgccgtgatcatgtgcgccaccatcgccatggtgctggtgaacatgttcggcgtgatgtggctgtggggcatcagcctgaacgccgtgagcctggtgaacctggtgatgagctgcggcatcagcgtggagttctgcagccacatcaccagagccttcaccgtgagcatgaagggcagcagagtggagagagccgaggaggccctggcccacatgggcagcagcgtgttcagcggcatcaccctgaccaagttcggcggcatcgtggtgctggccttcgccaagagccagatcttccagatcttctacttcagaatgtacctggccatggtgctgctgggcgccacccacggcctgatcttcctgcccgtgctgctgagctacatcggccccagcgtgaacaaggccaagagctgcgccaccgaggagagatacaagggcaccgagagagagagactgctgaacttctgactcgaggacggggtgaactacgcctgaggatccgatctttttccctctgccaaaaattatggggacatcatgaagccccttgagcatctgacttctggctaataaaggaaatttattttcattgcaatagtgtgttggaattttttgtgtctctcactcggcctaggtagataagtagcatggcgggttaatcattaactacaaggaacccctagtgatggagttggccactccctctctgcgcgctcgctcgctcactgaggccgggcgaccaaaggtcgcccgacgcccgggctttgcccgggcggcctcagtgagcgagcgagcgcgcag

SEQ ID NO: 1758 - DNA, 4672 bp, Artificial Sequence
  source: /note="Description of Artificial Sequence: Synthetic polynucleotide"
ctgcgcgctcgctcgctcactgaggccgcccgggcaaagcccgggcgtcgggcgacctttggtcgcccggcctcagtgagcgagcgagcgcgcagagagggagtggccaactccatcactaggggttccttgtagttaatgattaacccgccatgctacttatctaccagggtaatggggatcctctagaactatagctaacgcgtccacgttctgcttcactctccccatctcccccccctccccacccccaattttgtatttatttattttttaattattttgtgcagcgatgggggcggggggggggggcgcgcgccaggcggggcggggcggggcgaggggcggggcggggcgaggcggagaggtgcggcggcagccaatcagagcggcgcgctccgaaagtttccttttatggcgaggcggcggcggcggcggccctataaaaagcgaagcgcgcggcgggcgggagcaagcttcgtttcgaaccggtgccgccaccatgaccgctcgcggcctggcccttggcctcctcctgctgctactgtgtccagcgcaggtgttttcacagtcctgtgtttggtatggagagtgtggaattgcatatggggacaagaggtacaattgcgaatattctggcccaccaaaaccattgccaaaggatggatatgacttagtgcaggaactctgtccaggattcttctttggcaatgtcagtctctgttgtgatgttcggcagcttcagacactaaaagacaacctgcagctgcctctacagtttctgtccagatgtccatcctgtttttataacctactgaacctgttttgtgagctgacatgtagccctcgacagagtcagtttttgaatgttacagctactgaagattatgttgatcctgttacaaaccagacgaaaacaaatgtgaaagagttacaatactacgtcggacagagttttgccaatgcaatgtacaatgcctgccgggatgtggaggccccctcaagtaatgacaaggccctgggactcctgtgtgggaaggacgctgacgcctgtaatgccaccaactggattgaatacatgttcaataaggacaatggacaggcaccttttaccatcactcctgtgttttcagattttccagtccatgggatggagcccatgaacaatgccaccaaaggctgtgacgagtctgtggatgaggtcacagcaccatgtagctgccaagactgctctattgtctgtggccccaagccccagcccccacctcctcctgctccctggacgatccttggcttggacgccatgtatgtcatcatgtggatcacctacatggcgtttttgcttgtgttttttggagcattttttgcagtgtggtgctacagaaaacggtattttgtctccgagtacactcccatcgatagcaatatagctttttctgttaatgcaagtgacaaaggagaggcgtcctgctgtgaccctgtcagcgcagcatttgagggctgcttgaggcggctgttcacacgctgggggtctttctgcgtccgaaaccctggctgtgtcattttcttctcgctggtcttcattactgcgtgttcgtcaggcctggtgtttgtccgggtcacaaccaatccagttgacctctggtcagcccccagcagccaggctcgcctggaaaaagagtactttgaccagcactttgggcctttcttccggacggagcagctcatcatccgggcccctctcactgacaaacacatttaccagccatacccttcgggagctgatgtaccctttggacctccgcttgacatacagatactgcaccaggttcttgacttacaaatagccatcgaaaacattactgcctcttatgacaatgagactgtgacacttcaagacatctgcttggcccctctttcaccgtataacacgaactgcaccattttgagtgtgttaaattacttccagaacagccattccgtgctggaccacaagaaaggggacgacttctttgtgtatgccgattaccacacgcactttctgtactgcgtacgggctcctgcctctctgaatgatacaagtttgctccatgacccttgtctgggtacgtttggtggaccagtgttcccgtggcttgtgttgggaggctatgatgatcaaaactacaataacgccactgcccttgtgattaccttccctgtcaataattactataatgatacagagaagctccagagggcccaggcctgggaaaaagagtttattaattttgtgaaaaactacaagaatcccaatctgaccatttccttcactgctgaacgaagtattgaagatgaactaaatcgtgaaagtgacagtgatgtcttcaccgttgtaattagctatgccatcatgtttctatatatttccctagccttggggcacatcaaaagctgtcgcaggcttctggtggattcgaaggtctcactaggcatcgcgggcatcttgatcgtgctgagctcggtggcttgctccttgggtgtcttcagctacattgggttgcccttgaccctcattgtgattgaagtcatcccgttcctggtgctggctgttggagtggacaacatcttcattctggtgcaggcctaccagagagatgaacgtcttcaaggggaaaccctggatcagcagctgggcagggtcctaggagaagtggctcccagtatgttcctgtcatccttttctgagactgtagcatttttcttaggagcattgtccgtgatgccagccgtgcacaccttctctctctttgcgggattggcagtcttcattgactttcttctgcagattacctgtttcgtgagtctcttggggttagacattaaacgtcaagagaaaaatcggctagacatcttttgctgtgtcagaggtgctgaagatggaacaagcgtccaggcctcagagagctgtttgtttcgcttcttcaaaaactcctattctccacttctgctaaaggactggatgagaccaattgtgatagcaatatttgtgggtgttctgtcattcagcatcgcagtcctgaacaaagtagatattggattggatcagtctctttcgatgccagatgactcctacatggtggattatttcaaatccatcagtcagtacctgcatgcgggtccgcctgtgtactttgtcctggaggaagggcacgactacacttcttccaaggggcagaacatggtgtgcggcggcatgggctgcaacaatgattccctggtgcagcagatatttaacgcggcgcagctggacaactatacccgaataggcttcgccccctcgtcctggatcgacgattatttcgactgggtgaagccacagtcgtcttgctgtcgagtggacaatatcactgaccagttctgcaatgcttcagtggttgaccctgcctgcgttcgctgcaggcctctgactccggaaggcaaacagaggcctcaggggggagacttcatgagattcctgcccatgttcctttcggataaccctaaccccaagtgtggcaaagggggacatgctgcctatagttctgcagttaacatcctccttggccatggcaccagggtcggagccacgtacttcatgacctaccacaccgtgctgcagacctctgctgactttattgacgctctgaagaaagcccgacttatagccagtaatgtcaccgaaaccatgggcattaacggcagtgcctaccgagtatttccttacagtgtgttttatgtcttctacgaacagtacctgaccatcattgacgacactatcttcaacctcggtgtgtccctgggcgcgatatttctggtgaccatggtcctcctgggctgtgagctctggtctgcagtcatcatgtgtgccaccatcgccatggtcttggtcaacatgtttggagttatgtggctctggggcatcagtctgaacgctgtatccttggtcaacctggtgatgagctgtggcatctccgtggagttctgcagccacataaccagagcgttcacggtgagcatgaaaggcagccgcgtggagcgcgcggaagaggcacttgcccacatgggcagctccgtgttcagtggaatcacacttacaaaatttggagggattgtggtgttggcttttgccaaatctcaaattttccagatattctacttcaggatgtatttggccatggtcttactgggagccactcacggattaatatttctccctgtcttactcagttacatagggccatcagtaaataaagccaaaagttgtgccactgaagagcgatacaaaggaacagagcgcgaacggcttctaaatttctagctcgaggacggggtgaactacgcctgaggatccgatctttttccctctgccaaaaattatggggacatcatgaagccccttgagcatctgacttctggctaataaaggaaatttattttcattgcaatagtgtgttggaattttttgtgtctctcactcggcctaggtagataagtagcatggcgggttaatcattaactacaaggaacccctagtgatggagttggccactccctctctgcgcgctcgctcgctcactgaggccgggcgaccaaaggtcgcccgacgcccgggctttgcccgggcggcctcagtgagcgagcgagcgcgcag

SEQ ID NO: 1759 - DNA, 4744 bp, Artificial Sequence
  source: /note="Description of Artificial Sequence: Synthetic polynucleotide"
ctgcgcgctcgctcgctcactgaggccgcccgggcaaagcccgggcgtcgggcgacctttggtcgcccggcctcagtgagcgagcgagcgcgcagagagggagtggccaactccatcactaggggttccttgtagttaatgattaacccgccatgctacttatctaccagggtaatggggatcctctagaactatagctaacgcgttacatgaccttatgggactttcctacttggcagtacatctacgtattagtcatcgctattaccatgtcgaggccacgttctgcttcactctccccatctcccccccctccccacccccaattttgtatttatttattttttaattattttgtgcagcgatgggggcggggggggggggcgcgcgccaggcggggcggggcggggcgaggggcggggcggggcgaggcggagaggtgcggcggcagccaatcagagcggcgcgctccgaaagtttccttttatggcgaggcggcggcggcggcggccctataaaaagcgaagcgcgcggcgggcgggagcaagcttcgtttcgaaccggtgccgccaccatgaccgctcgcggcctggcccttggcctcctcctgctgctactgtgtccagcgcaggtgttttcacagtcctgtgtttggtatggagagtgtggaattgcatatggggacaagaggtacaattgcgaatattctggcccaccaaaaccattgccaaaggatggatatgacttagtgcaggaactctgtccaggattcttctttggcaatgtcagtctctgttgtgatgttcggcagcttcagacactaaaagacaacctgcagctgcctctacagtttctgtccagatgtccatcctgtttttataacctactgaacctgttttgtgagctgacatgtagccctcgacagagtcagtttttgaatgttacagctactgaagattatgttgatcctgttacaaaccagacgaaaacaaatgtgaaagagttacaatactacgtcggacagagttttgccaatgcaatgtacaatgcctgccgggatgtggaggccccctcaagtaatgacaaggccctgggactcctgtgtgggaaggacgctgacgcctgtaatgccaccaactggattgaatacatgttcaataaggacaatggacaggcaccttttaccatcactcctgtgttttcagattttccagtccatgggatggagcccatgaacaatgccaccaaaggctgtgacgagtctgtggatgaggtcacagcaccatgtagctgccaagactgctctattgtctgtggccccaagccccagcccccacctcctcctgctccctggacgatccttggcttggacgccatgtatgtcatcatgtggatcacctacatggcgtttttgcttgtgttttttggagcattttttgcagtgtggtgctacagaaaacggtattttgtctccgagtacactcccatcgatagcaatatagctttttctgttaatgcaagtgacaaaggagaggcgtcctgctgtgaccctgtcagcgcagcatttgagggctgcttgaggcggctgttcacacgctgggggtctttctgcgtccgaaaccctggctgtgtcattttcttctcgctggtcttcattactgcgtgttcgtcaggcctggtgtttgtccgggtcacaaccaatccagttgacctctggtcagcccccagcagccaggctcgcctggaaaaagagtactttgaccagcactttgggcctttcttccggacggagcagctcatcatccgggcccctctcactgacaaacacatttaccagccatacccttcgggagctgatgtaccctttggacctccgcttgacatacagatactgcaccaggttcttgacttacaaatagccatcgaaaacattactgcctcttatgacaatgagactgtgacacttcaagacatctgcttggcccctctttcaccgtataacacgaactgcaccattttgagtgtgttaaattacttccagaacagccattccgtgctggaccacaagaaaggggacgacttctttgtgtatgccgattaccacacgcactttctgtactgcgtacgggctcctgcctctctgaatgatacaagtttgctccatgacccttgtctgggtacgtttggtggaccagtgttcccgtggcttgtgttgggaggctatgatgatcaaaactacaataacgccactgcccttgtgattaccttccctgtcaataattactataatgatacagagaagctccagagggcccaggcctgggaaaaagagtttattaattttgtgaaaaactacaagaatcccaatctgaccatttccttcactgctgaacgaagtattgaagatgaactaaatcgtgaaagtgacagtgatgtcttcaccgttgtaattagctatgccatcatgtttctatatatttccctagccttggggcacatcaaaagctgtcgcaggcttctggtggattcgaaggtctcactaggcatcgcgggcatcttgatcgtgctgagctcggtggcttgctccttgggtgtcttcagctacattgggttgcccttgaccctcattgtgattgaagtcatcccgttcctggtgctggctgttggagtggacaacatcttcattctggtgcaggcctaccagagagatgaacgtcttcaaggggaaaccctggatcagcagctgggcagggtcctaggagaagtggctcccagtatgttcctgtcatccttttctgagactgtagcatttttcttaggagcattgtccgtgatgccagccgtgcacaccttctctctctttgcgggattggcagtcttcattgactttcttctgcagattacctgtttcgtgagtctcttggggttagacattaaacgtcaagagaaaaatcggctagacatcttttgctgtgtcagaggtgctgaagatggaacaagcgtccaggcctcagagagctgtttgtttcgcttcttcaaaaactcctattctccacttctgctaaaggactggatgagaccaattgtgatagcaatatttgtgggtgttctgtcattcagcatcgcagtcctgaacaaagtagatattggattggatcagtctctttcgatgccagatgactcctacatggtggattatttcaaatccatcagtcagtacctgcatgcgggtccgcctgtgtactttgtcctggaggaagggcacgactacacttcttccaaggggcagaacatggtgtgcggcggcatgggctgcaacaatgattccctggtgcagcagatatttaacgcggcgcagctggacaactatacccgaataggcttcgccccctcgtcctggatcgacgattatttcgactgggtgaagccacagtcgtcttgctgtcgagtggacaatatcactgaccagttctgcaatgcttcagtggttgaccctgcctgcgttcgctgcaggcctctgactccggaaggcaaacagaggcctcaggggggagacttcatgagattcctgcccatgttcctttcggataaccctaaccccaagtgtggcaaagggggacatgctgcctatagttctgcagttaacatcctccttggccatggcaccagggtcggagccacgtacttcatgacctaccacaccgtgctgcagacctctgctgactttattgacgctctgaagaaagcccgacttatagccagtaatgtcaccgaaaccatgggcattaacggcagtgcctaccgagtatttccttacagtgtgttttatgtcttctacgaacagtacctgaccatcattgacgacactatcttcaacctcggtgtgtccctgggcgcgatatttctggtgaccatggtcctcctgggctgtgagctctggtctgcagtcatcatgtgtgccaccatcgccatggtcttggtcaacatgtttggagttatgtggctctggggcatcagtctgaacgctgtatccttggtcaacctggtgatgagctgtggcatctccgtggagttctgcagccacataaccagagcgttcacggtgagcatgaaaggcagccgcgtggagcgcgcggaagaggcacttgcccacatgggcagctccgtgttcagtggaatcacacttacaaaatttggagggattgtggtgttggcttttgccaaatctcaaattttccagatattctacttcaggatgtatttggccatggtcttactgggagccactcacggattaatatttctccctgtcttactcagttacatagggccatcagtaaataaagccaaaagttgtgccactgaagagcgatacaaaggaacagagcgcgaacggcttctaaatttctagctcgaggacggggtgaactacgcctgaggatccgatctttttccctctgccaaaaattatggggacatcatgaagccccttgagcatctgacttctggctaataaaggaaatttattttcattgcaatagtgtgttggaattttttgtgtctctcactcggcctaggtagataagtagcatggcgggttaatcattaactacaaggaacccctagtgatggagttggccactccctctctgcgcgctcgctcgctcactgaggccgggcgaccaaaggtcgcccgacgcccgggctttgcccgggcggcctcagtgagcgagcgagcgcgcag

SEQ ID NO: 1760-1779 - skipped (20 entries)

SEQ ID NO: 1780 - DNA, 133 bp, Artificial Sequence
  source: /note="Description of Artificial Sequence: Synthetic polynucleotide"
gtaagtatcaaggttacaagacaggtttaaggagaccaatagaaactgggcttgtcgagacagagaagactcttgcgtttctgataggcacctattggtcttactgacatccactttgcctttctctccacag

SEQ ID NO: 1781 - DNA, 1184 bp, Unknown"
  source: /note="Description of Unknown: EF1a Promoter sequence"
cgtgaggctccggtgcccgtcagtgggcagagcgcacatcgcccacagtccccgagaagttggggggaggggtcggcaattgaaccggtgcctagagaaggtggcgcggggtaaactgggaaagtgatgtcgtgtactggctccgcctttttcccgagggtgggggagaaccgtatataagtgcagtagtcgccgtgaacgttctttttcgcaacgggtttgccgccagaacacaggtaagtgccgtgtgtggttcccgcgggcctggcctctttacgggttatggcccttgcgtgccttgaattacttccacctggctgcagtacgtgattcttgatcccgagcttcgggttggaagtgggtgggagagttcgaggccttgcgcttaaggagccccttcgcctcgtgcttgagttgaggcctggcctgggcgctggggccgccgcgtgcgaatctggtggcaccttcgcgcctgtctcgctgctttcgataagtctctagccatttaaaatttttgatgacctgctgcgacgctttttttctggcaagatagtcttgtaaatgcgggccaagatctgcacactggtatttcggtttttggggccgcgggcggcgacggggcccgtgcgtcccagcgcacatgttcggcgaggcggggcctgcgagcgcggccaccgagaatcggacgggggtagtctcaagctggccggcctgctctggtgcctggcctcgcgccgccgtgtatcgccccgccctgggcggcaaggctggcccggtcggcaccagttgcgtgagcggaaagatggccgcttcccggccctgctgcagggagctcaaaatggaggacgcggcgctcgggagagcgggcgggtgagtcacccacacaaaggaaaagggcctttccgtcctcagccgtcgcttcatgtgactccacggagtaccgggcgccgtccaggcacctcgattagttctcgagcttttggagtacgtcgtctttaggttggggggaggggttttatgcgatggagtttccccacactgagtgggtggagactgaagttaggccagcttggcacttgatgtaattctccttggaatttgccctttttgagtttggatcttggttcattctcaagcctcagacagtggttcaaagtttttttcttccatttcaggtgtcgtga

SEQ ID NO: 1782 - DNA, 229 bp, Artificial Sequence
  source: /note="Description of Artificial Sequence: Synthetic polynucleotide"
gtgcccgtcagtgggcagagcgcacatcgcccacagtccccgagaagttggggggaggggtcggcaattgaaccggtgcctagagaaggtggcgcggggtaaactgggaaagtgatgtcgtgtactggctccgcctttttcccgagggtgggggagaaccgtatataagtgcagtagtcgccgtgaacgttctttttcgcaacgggtttgccgccagaacacgcgtaag

SEQ ID NO: 1783 - DNA, 235 bp, Artificial Sequence
  source: /note="Description of Artificial Sequence: Synthetic polynucleotide"
gctccggtgcccgtcagtgggcagagcgcacatcgcccacagtccccgagaagttggggggaggggtcggcaattgaaccggtgcctagagaaggtggcgcggggtaaactgggaaagtgatgtcgtgtactggctccgcctttttcccgagggtgggggagaaccgtatataagtgcagtagtcgccgtgaacgttctttttcgcaacgggtttgccgccagaacacgcgtaag

SEQ ID NO: 1784 - DNA, 241 bp, Artificial Sequence
  source: /note="Description of Artificial Sequence: Synthetic polynucleotide"
cgtgaggctccggtgcccgtcagtgggcagagcgcacatcgcccacagtccccgagaagttggggggaggggtcggcaattgaaccggtgcctagagaaggtggcgcggggtaaactgggaaagtgatgtcgtgtactggctccgcctttttcccgagggtgggggagaaccgtatataagtgcagtagtcgccgtgaacgttctttttcgcaacgggtttgccgccagaacacgcgtaag

SEQ ID NO: 1785 - DNA, 236 bp, Artificial Sequence
  source: /note="Description of Artificial Sequence: Synthetic polynucleotide"
cgtgaggctccggtgcccgtcagtgggcagagcgcacatcgcccacagtccccgagaagttggggggaggggtcggcaattgaaccggtgcctagagaaggtggcgcggggtaaactgggaaagtgatgtcgtgtactggctccgcctttttcccgagggtgggggagaaccgtatataagtgcagtagtcgccgtgaacgttctttttcgcaacgggtttgccgccagaacacag

SEQ ID NO: 1786 - DNA, 246 bp, Artificial Sequence
  source: /note="Description of Artificial Sequence: Synthetic polynucleotide"
gcatgcgtgaggctccggtgcccgtcagtgggcagagcgcacatcgcccacagtccccgagaagttggggggaggggtcggcaattgaaccggtgcctagagaaggtggcgcggggtaaactgggaaagtgatgtcgtgtactggctccgcctttttcccgagggtgggggagaaccgtatataagtgcagtagtcgccgtgaacgttctttttcgcaacgggtttgccgccagaacacgcgtaag

SEQ ID NO: 1787 - DNA, 241 bp, Artificial Sequence
  source: /note="Description of Artificial Sequence: Synthetic polynucleotide"
gcatgcgtgaggctccggtgcccgtcagtgggcagagcgcacatcgcccacagtccccgagaagttggggggaggggtcggcaattgaaccggtgcctagagaaggtggcgcggggtaaactgggaaagtgatgtcgtgtactggctccgcctttttcccgagggtgggggagaaccgtatataagtgcagtagtcgccgtgaacgttctttttcgcaacgggtttgccgccagaacacag

SEQ ID NO: 1788 - DNA, 257 bp, Artificial Sequence
  source: /note="Description of Artificial Sequence: Synthetic polynucleotide"
ggtggagaagagcatgcgtgaggctccggtgcccgtcagtgggcagagcgcacatcgcccacagtccccgagaagttggggggaggggtcggcaattgaaccggtgcctagagaaggtggcgcggggtaaactgggaaagtgatgtcgtgtactggctccgcctttttcccgagggtgggggagaaccgtatataagtgcagtagtcgccgtgaacgttctttttcgcaacgggtttgccgccagaacacgcgtaag

SEQ ID NO: 1789 - DNA, 252 bp, Artificial Sequence
  source: /note="Description of Artificial Sequence: Synthetic polynucleotide"
ggtggagaagagcatgcgtgaggctccggtgcccgtcagtgggcagagcgcacatcgcccacagtccccgagaagttggggggaggggtcggcaattgaaccggtgcctagagaaggtggcgcggggtaaactgggaaagtgatgtcgtgtactggctccgcctttttcccgagggtgggggagaaccgtatataagtgcagtagtcgccgtgaacgttctttttcgcaacgggtttgccgccagaacacag

SEQ ID NO: 1790 - DNA, 268 bp, Artificial Sequence
  source: /note="Description of Artificial Sequence: Synthetic polynucleotide"
gtcatcactgaggtggagaagagcatgcgtgaggctccggtgcccgtcagtgggcagagcgcacatcgcccacagtccccgagaagttggggggaggggtcggcaattgaaccggtgcctagagaaggtggcgcggggtaaactgggaaagtgatgtcgtgtactggctccgcctttttcccgagggtgggggagaaccgtatataagtgcagtagtcgccgtgaacgttctttttcgcaacgggtttgccgccagaacacgcgtaag

SEQ ID NO: 1791 - DNA, 263 bp, Artificial Sequence
  source: /note="Description of Artificial Sequence: Synthetic polynucleotide"
gtcatcactgaggtggagaagagcatgcgtgaggctccggtgcccgtcagtgggcagagcgcacatcgcccacagtccccgagaagttggggggaggggtcggcaattgaaccggtgcctagagaaggtggcgcggggtaaactgggaaagtgatgtcgtgtactggctccgcctttttcccgagggtgggggagaaccgtatataagtgcagtagtcgccgtgaacgttctttttcgcaacgggtttgccgccagaacacag

SEQ ID NO: 1792 - DNA, 5 bp, Artificial Sequence
  source: /note="Description of Artificial Sequence: Synthetic oligonucleotide"
gcatg

SEQ ID NO: 1793 - DNA, 16 bp, Artificial Sequence
  source: /note="Description of Artificial Sequence: Synthetic oligonucleotide"
ggtggagaagagcatg

SEQ ID NO: 1794 - DNA, 27 bp, Artificial Sequence
  source: /note="Description of Artificial Sequence: Synthetic oligonucleotide"
gtcatcactgaggtggagaagagcatg

SEQ ID NO: 1795 - DNA, 6 bp, Artificial Sequence
  source: /note="Description of Artificial Sequence: Synthetic oligonucleotide"
cgtgag

SEQ ID NO: 1796 - DNA, 2 bp, Artificial Sequence
  source: /note="Description of Artificial Sequence: Synthetic oligonucleotide"
gt

SEQ ID NO: 1797 - DNA, 8 bp, Artificial Sequence
  source: /note="Description of Artificial Sequence: Synthetic oligonucleotide"
gctccggt

SEQ ID NO: 1798 - DNA, 5 bp, Artificial Sequence
  source: /note="Description of Artificial Sequence: Synthetic oligonucleotide"
gtaag

SEQ ID NO: 1799 - DNA, 4648 bp, Artificial Sequence
  source: /note="Description of Artificial Sequence: Synthetic polynucleotide"
ctgcgcgctcgctcgctcactgaggccgcccgggcaaagcccgggcgtcgggcgacctttggtcgcccggcctcagtgagcgagcgagcgcgcagagagggagtggccaactccatcactaggggttccttgtagttaatgattaacccgccatgctacttatctaccagggtaatggggatcctctagaactatagctaacgcgtcgtgaggctccggtgcccgtcagtgggcagagcgcacatcgcccacagtccccgagaagttggggggaggggtcggcaattgaaccggtgcctagagaaggtggcgcggggtaaactgggaaagtgatgtcgtgtactggctccgcctttttcccgagggtgggggagaaccgtatataagtgcagtagtcgccgtgaacgttctttttcgcaacgggtttgccgccagaacacagcgggagcaagcttcgtttcgaaccggtgccgccaccatgaccgccaggggcctggccctgggactgctgctgctgctgctgtgcccagcccaggtgttctctcagagctgcgtgtggtatggcgagtgtggcatcgcctacggcgacaagcggtacaactgcgagtacagcggaccacctaagccactgccaaaggacggctacgatctggtgcaggagctgtgccctggcttctttttcggcaacgtgtccctgtgctgtgacgtgcggcagctgcagaccctgaaggataatctgcagctgcctctgcagtttctgtctagatgcccaagctgtttttataacctgctgaatctgttctgcgagctgacctgttccccaaggcagtctcagttcctgaacgtgaccgccacagaggactacgtggatcccgtgacaaaccagaccaagacaaatgtgaaggagctgcagtactatgtgggccagagcttcgccaacgccatgtataatgcatgcagggacgtggaggcacccagctccaatgataaggccctgggactgctgtgcggcaaggacgcagatgcctgtaacgccaccaattggatcgagtacatgtttaacaaggataatggccaggcccctttcaccatcacaccagtgttttccgacttccccgtgcacggcatggagcctatgaacaatgccaccaagggctgcgacgagtctgtggatgaggtgacagccccttgcagctgtcaggattgctccatcgtgtgcggacctaagccacagccaccacctccaccagcaccatggaccatcctgggactggacgccatgtatgtgatcatgtggatcacatacatggcctttctgctggtgtttttcggcgcctttttcgccgtgtggtgctatcggaagagatacttcgtgagcgagtacacccccatcgacagcaacatcgccttcagcgtgaatgcctccgacaagggcgaggcatcctgctgtgatcccgtgagcgccgccttcgagggatgcctgcggagactgtttacccggtggggctctttctgcgtgagaaacccaggctgcgtgatctttttcagcctggtgtttatcacagcctgttctagcggcctggtgttcgtgagggtgaccacaaatccagtggatctgtggagcgccccctcctctcaggcaaggctggagaaggagtactttgaccagcacttcggcccatttttcaggaccgagcagctgatcatcagggcaccactgacagataagcacatctaccagccatatcctagcggagcagacgtgcccttcggccctccactggatatccagatcctgcaccaggtgctggacctgcagatcgccatcgagaacatcaccgcctcctatgacaatgagaccgtgacactgcaggatatctgcctggcccctctgagcccatataacaccaattgtacaatcctgtccgtgctgaactactttcagaattcccactctgtgctggatcacaagaagggcgacgacttcttcgtgtacgccgactatcacacccacttcctgtactgcgtgcgggcccctgcctctctgaacgacaccagcctgctgcacgatccatgtctgggcacatttggcggccccgtgttcccttggctggtgctgggcggctatgacgatcagaactacaacaatgccaccgccctggtcatcaccttccctgtgaacaattactataatgataccgagaagctgcagagagcccaggcctgggagaaggagtttatcaacttcgtgaagaattacaagaacccaaatctgaccatcagcttcacagccgagcggtccatcgaggacgagctgaacagagagagcgactccgacgtgttcaccgtggtcatcagctatgccatcatgttcctgtacatcagcctggccctgggccacatcaagtcctgcaggcgcctgctggtggatagcaaggtgtccctgggcatcgccggcatcctgatcgtgctgagctccgtggcctgttccctgggcgtgttctcttatatcggcctgcctctgaccctgatcgtgatcgaagtgatcccatttctggtgctggccgtgggcgtggacaatatcttcatcctggtgcaggcataccagagggacgagcgcctgcagggagagacactggatcagcagctgggaagggtgctgggagaggtggcaccatccatgtttctgtctagcttctctgagaccgtggcctttttcctgggcgccctgtccgtgatgccagcagtgcacacattttctctgttcgccggcctggccgtgtttatcgacttcctgctgcagatcacctgcttcgtgagcctgctgggcctggacatcaagaggcaggagaagaaccgcctggatatcttctgctgcgtgcggggagcagaggacggcacatccgtgcaggcctctgagagctgtctgttccggtttttcaagaattcctattctccactgctgctgaaggactggatgagacccatcgtgatcgccatctttgtgggcgtgctgagcttctccatcgccgtgctgaacaaggtggacatcggcctggatcagtctctgagcatgcccgacgatagctatatggtggattactttaagtccatctctcagtatctgcacgcaggaccccccgtgtacttcgtgctggaggagggccacgactacacctcctctaagggccagaatatggtgtgcggcggcatgggctgtaacaatgattccctggtgcagcagatcttcaacgccgcccagctggacaattatacacggatcggctttgcccccagctcctggatcgacgattacttcgattgggtgaagcctcagtctagctgctgtagagtggacaacatcaccgatcagttttgcaatgcaagcgtggtggaccctgcatgcgtgaggtgtaggccactgacaccagagggcaagcagaggccacagggaggcgacttcatgcgcttcctgcctatgttcctgtccgacaacccaaatccaaagtgtggcaagggaggacacgcagcatactcctctgccgtgaacatcctgctgggacacggaaccagggtgggagccacatacttcatgacctaccacacagtgctgcagacctccgccgacttcatcgatgccctgaagaaggccaggctgatcgcctctaacgtgaccgagacaatgggcatcaatggctctgcctatcgcgtgtttccctacagcgtgttttacgtgttctatgagcagtacctgaccatcatcgacgatacaatctttaacctgggcgtgagcctgggcgccatcttcctggtgaccatggtgctgctgggatgcgagctgtggtccgccgtgatcatgtgcgccacaatcgccatggtgctggtgaatatgttcggcgtgatgtggctgtggggcatcagcctgaacgccgtgtccctggtgaacctggtcatgtcttgcggcatcagcgtggagttttgtagccacatcaccagagccttcacagtgtccatgaagggctctcgggtggagagagcagaggaggccctggcacacatgggcagctccgtgttttctggcatcaccctgacaaagttcggcggcatcgtggtgctggcctttgccaagagccagatcttccagatcttttatttccggatgtacctggcaatggtgctgctgggagcaacccacggcctgatctttctgcccgtgctgctgtcttatatcggccctagcgtgaacaaggccaagtcctgcgccaccgaggagagatacaagggcacagagcgggagagactgctgaatttctgactcgaggacggggtgaactacgcctgaggatccgatctttttccctctgccaaaaattatggggacatcatgaagccccttgagcatctgacttctggctaataaaggaaatttattttcattgcaatagtgtgttggaattttttgtgtctctcactcggcctaggtagataagtagcatggcgggttaatcattaactacaaggaacccctagtgatggagttggccactccctctctgcgcgctcgctcgctcactgaggccgggcgaccaaaggtcgcccgacgcccgggctttgcccgggcggcctcagtgagcgagcgagcgcgcag

SEQ ID NO: 1800 - DNA, 4796 bp, Artificial Sequence
  source: /note="Description of Artificial Sequence: Synthetic polynucleotide"
ctgcgcgctcgctcgctcactgaggccgcccgggcaaagcccgggcgtcgggcgacctttggtcgcccggcctcagtgagcgagcgagcgcgcagagagggagtggccaactccatcactaggggttccttgtagttaatgattaacccgccatgctacttatctaccagggtaatggggatcctctagaactatagctaacgcgtcgtgaggctccggtgcccgtcagtgggcagagcgcacatcgcccacagtccccgagaagttggggggaggggtcggcaattgaaccggtgcctagagaaggtggcgcggggtaaactgggaaagtgatgtcgtgtactggctccgcctttttcccgagggtgggggagaaccgtatataagtgcagtagtcgccgtgaacgttctttttcgcaacgggtttgccgccagaacacagcgggagcaagcttcgtttagtgaaccggtaagtatcaaggttacaagacaggtttaaggagaccaatagaaactgggcttgtcgagacagagaagactcttgcgtttctgataggcacctattggtcttactgacatccactttgcctttctctccacaggggattcgaaccggtgccgccaccatgaccgccaggggcctggccctgggactgctgctgctgctgctgtgcccagcccaggtgttctctcagagctgcgtgtggtatggcgagtgtggcatcgcctacggcgacaagcggtacaactgcgagtacagcggaccacctaagccactgccaaaggacggctacgatctggtgcaggagctgtgccctggcttctttttcggcaacgtgtccctgtgctgtgacgtgcggcagctgcagaccctgaaggataatctgcagctgcctctgcagtttctgtctagatgcccaagctgtttttataacctgctgaatctgttctgcgagctgacctgttccccaaggcagtctcagttcctgaacgtgaccgccacagaggactacgtggatcccgtgacaaaccagaccaagacaaatgtgaaggagctgcagtactatgtgggccagagcttcgccaacgccatgtataatgcatgcagggacgtggaggcacccagctccaatgataaggccctgggactgctgtgcggcaaggacgcagatgcctgtaacgccaccaattggatcgagtacatgtttaacaaggataatggccaggcccctttcaccatcacaccagtgttttccgacttccccgtgcacggcatggagcctatgaacaatgccaccaagggctgcgacgagtctgtggatgaggtgacagccccttgcagctgtcaggattgctccatcgtgtgcggacctaagccacagccaccacctccaccagcaccatggaccatcctgggactggacgccatgtatgtgatcatgtggatcacatacatggcctttctgctggtgtttttcggcgcctttttcgccgtgtggtgctatcggaagagatacttcgtgagcgagtacacccccatcgacagcaacatcgccttcagcgtgaatgcctccgacaagggcgaggcatcctgctgtgatcccgtgagcgccgccttcgagggatgcctgcggagactgtttacccggtggggctctttctgcgtgagaaacccaggctgcgtgatctttttcagcctggtgtttatcacagcctgttctagcggcctggtgttcgtgagggtgaccacaaatccagtggatctgtggagcgccccctcctctcaggcaaggctggagaaggagtactttgaccagcacttcggcccatttttcaggaccgagcagctgatcatcagggcaccactgacagataagcacatctaccagccatatcctagcggagcagacgtgcccttcggccctccactggatatccagatcctgcaccaggtgctggacctgcagatcgccatcgagaacatcaccgcctcctatgacaatgagaccgtgacactgcaggatatctgcctggcccctctgagcccatataacaccaattgtacaatcctgtccgtgctgaactactttcagaattcccactctgtgctggatcacaagaagggcgacgacttcttcgtgtacgccgactatcacacccacttcctgtactgcgtgcgggcccctgcctctctgaacgacaccagcctgctgcacgatccatgtctgggcacatttggcggccccgtgttcccttggctggtgctgggcggctatgacgatcagaactacaacaatgccaccgccctggtcatcaccttccctgtgaacaattactataatgataccgagaagctgcagagagcccaggcctgggagaaggagtttatcaacttcgtgaagaattacaagaacccaaatctgaccatcagcttcacagccgagcggtccatcgaggacgagctgaacagagagagcgactccgacgtgttcaccgtggtcatcagctatgccatcatgttcctgtacatcagcctggccctgggccacatcaagtcctgcaggcgcctgctggtggatagcaaggtgtccctgggcatcgccggcatcctgatcgtgctgagctccgtggcctgttccctgggcgtgttctcttatatcggcctgcctctgaccctgatcgtgatcgaagtgatcccatttctggtgctggccgtgggcgtggacaatatcttcatcctggtgcaggcataccagagggacgagcgcctgcagggagagacactggatcagcagctgggaagggtgctgggagaggtggcaccatccatgtttctgtctagcttctctgagaccgtggcctttttcctgggcgccctgtccgtgatgccagcagtgcacacattttctctgttcgccggcctggccgtgtttatcgacttcctgctgcagatcacctgcttcgtgagcctgctgggcctggacatcaagaggcaggagaagaaccgcctggatatcttctgctgcgtgcggggagcagaggacggcacatccgtgcaggcctctgagagctgtctgttccggtttttcaagaattcctattctccactgctgctgaaggactggatgagacccatcgtgatcgccatctttgtgggcgtgctgagcttctccatcgccgtgctgaacaaggtggacatcggcctggatcagtctctgagcatgcccgacgatagctatatggtggattactttaagtccatctctcagtatctgcacgcaggaccccccgtgtacttcgtgctggaggagggccacgactacacctcctctaagggccagaatatggtgtgcggcggcatgggctgtaacaatgattccctggtgcagcagatcttcaacgccgcccagctggacaattatacacggatcggctttgcccccagctcctggatcgacgattacttcgattgggtgaagcctcagtctagctgctgtagagtggacaacatcaccgatcagttttgcaatgcaagcgtggtggaccctgcatgcgtgaggtgtaggccactgacaccagagggcaagcagaggccacagggaggcgacttcatgcgcttcctgcctatgttcctgtccgacaacccaaatccaaagtgtggcaagggaggacacgcagcatactcctctgccgtgaacatcctgctgggacacggaaccagggtgggagccacatacttcatgacctaccacacagtgctgcagacctccgccgacttcatcgatgccctgaagaaggccaggctgatcgcctctaacgtgaccgagacaatgggcatcaatggctctgcctatcgcgtgtttccctacagcgtgttttacgtgttctatgagcagtacctgaccatcatcgacgatacaatctttaacctgggcgtgagcctgggcgccatcttcctggtgaccatggtgctgctgggatgcgagctgtggtccgccgtgatcatgtgcgccacaatcgccatggtgctggtgaatatgttcggcgtgatgtggctgtggggcatcagcctgaacgccgtgtccctggtgaacctggtcatgtcttgcggcatcagcgtggagttttgtagccacatcaccagagccttcacagtgtccatgaagggctctcgggtggagagagcagaggaggccctggcacacatgggcagctccgtgttttctggcatcaccctgacaaagttcggcggcatcgtggtgctggcctttgccaagagccagatcttccagatcttttatttccggatgtacctggcaatggtgctgctgggagcaacccacggcctgatctttctgcccgtgctgctgtcttatatcggccctagcgtgaacaaggccaagtcctgcgccaccgaggagagatacaagggcacagagcgggagagactgctgaatttctgactcgaggacggggtgaactacgcctgaggatccgatctttttccctctgccaaaaattatggggacatcatgaagccccttgagcatctgacttctggctaataaaggaaatttattttcattgcaatagtgtgttggaattttttgtgtctctcactcggcctaggtagataagtagcatggcgggttaatcattaactacaaggaacccctagtgatggagttggccactccctctctgcgcgctcgctcgctcactgaggccgggcgaccaaaggtcgcccgacgcccgggctttgcccgggcggcctcagtgagcgagcgagcgcgcag

SEQ ID NO: 1801 - DNA, 4629 bp, Artificial Sequence
  source: /note="Description of Artificial Sequence: Synthetic polynucleotide"
ctgcgcgctcgctcgctcactgaggccgcccgggcaaagcccgggcgtcgggcgacctttggtcgcccggcctcagtgagcgagcgagcgcgcagagagggagtggccaactccatcactaggggttccttgtagttaatgattaacccgccatgctacttatctaccagggtaatggggatcctctagaactatagctaacgcgtgctattaccatggtgatgcggttttggcagtacatcaatgggcgtggatagcggtttgactcacggggatttccaagtctccaccccattgacgtcaatgggagtttgttttggcaccaaaatcaacgggactttccaaaatgtcgtaacaactccgccccattgacgcaaatgggcggtaggcgtgtacggtgggaggtctatataagcagagctccgggagcaagcttcgtttcgaaccggtgccgccaccatgaccgccaggggcctggccctgggactgctgctgctgctgctgtgcccagcccaggtgttctctcagagctgcgtgtggtatggcgagtgtggcatcgcctacggcgacaagcggtacaactgcgagtacagcggaccacctaagccactgccaaaggacggctacgatctggtgcaggagctgtgccctggcttctttttcggcaacgtgtccctgtgctgtgacgtgcggcagctgcagaccctgaaggataatctgcagctgcctctgcagtttctgtctagatgcccaagctgtttttataacctgctgaatctgttctgcgagctgacctgttccccaaggcagtctcagttcctgaacgtgaccgccacagaggactacgtggatcccgtgacaaaccagaccaagacaaatgtgaaggagctgcagtactatgtgggccagagcttcgccaacgccatgtataatgcatgcagggacgtggaggcacccagctccaatgataaggccctgggactgctgtgcggcaaggacgcagatgcctgtaacgccaccaattggatcgagtacatgtttaacaaggataatggccaggcccctttcaccatcacaccagtgttttccgacttccccgtgcacggcatggagcctatgaacaatgccaccaagggctgcgacgagtctgtggatgaggtgacagccccttgcagctgtcaggattgctccatcgtgtgcggacctaagccacagccaccacctccaccagcaccatggaccatcctgggactggacgccatgtatgtgatcatgtggatcacatacatggcctttctgctggtgtttttcggcgcctttttcgccgtgtggtgctatcggaagagatacttcgtgagcgagtacacccccatcgacagcaacatcgccttcagcgtgaatgcctccgacaagggcgaggcatcctgctgtgatcccgtgagcgccgccttcgagggatgcctgcggagactgtttacccggtggggctctttctgcgtgagaaacccaggctgcgtgatctttttcagcctggtgtttatcacagcctgttctagcggcctggtgttcgtgagggtgaccacaaatccagtggatctgtggagcgccccctcctctcaggcaaggctggagaaggagtactttgaccagcacttcggcccatttttcaggaccgagcagctgatcatcagggcaccactgacagataagcacatctaccagccatatcctagcggagcagacgtgcccttcggccctccactggatatccagatcctgcaccaggtgctggacctgcagatcgccatcgagaacatcaccgcctcctatgacaatgagaccgtgacactgcaggatatctgcctggcccctctgagcccatataacaccaattgtacaatcctgtccgtgctgaactactttcagaattcccactctgtgctggatcacaagaagggcgacgacttcttcgtgtacgccgactatcacacccacttcctgtactgcgtgcgggcccctgcctctctgaacgacaccagcctgctgcacgatccatgtctgggcacatttggcggccccgtgttcccttggctggtgctgggcggctatgacgatcagaactacaacaatgccaccgccctggtcatcaccttccctgtgaacaattactataatgataccgagaagctgcagagagcccaggcctgggagaaggagtttatcaacttcgtgaagaattacaagaacccaaatctgaccatcagcttcacagccgagcggtccatcgaggacgagctgaacagagagagcgactccgacgtgttcaccgtggtcatcagctatgccatcatgttcctgtacatcagcctggccctgggccacatcaagtcctgcaggcgcctgctggtggatagcaaggtgtccctgggcatcgccggcatcctgatcgtgctgagctccgtggcctgttccctgggcgtgttctcttatatcggcctgcctctgaccctgatcgtgatcgaagtgatcccatttctggtgctggccgtgggcgtggacaatatcttcatcctggtgcaggcataccagagggacgagcgcctgcagggagagacactggatcagcagctgggaagggtgctgggagaggtggcaccatccatgtttctgtctagcttctctgagaccgtggcctttttcctgggcgccctgtccgtgatgccagcagtgcacacattttctctgttcgccggcctggccgtgtttatcgacttcctgctgcagatcacctgcttcgtgagcctgctgggcctggacatcaagaggcaggagaagaaccgcctggatatcttctgctgcgtgcggggagcagaggacggcacatccgtgcaggcctctgagagctgtctgttccggtttttcaagaattcctattctccactgctgctgaaggactggatgagacccatcgtgatcgccatctttgtgggcgtgctgagcttctccatcgccgtgctgaacaaggtggacatcggcctggatcagtctctgagcatgcccgacgatagctatatggtggattactttaagtccatctctcagtatctgcacgcaggaccccccgtgtacttcgtgctggaggagggccacgactacacctcctctaagggccagaatatggtgtgcggcggcatgggctgtaacaatgattccctggtgcagcagatcttcaacgccgcccagctggacaattatacacggatcggctttgcccccagctcctggatcgacgattacttcgattgggtgaagcctcagtctagctgctgtagagtggacaacatcaccgatcagttttgcaatgcaagcgtggtggaccctgcatgcgtgaggtgtaggccactgacaccagagggcaagcagaggccacagggaggcgacttcatgcgcttcctgcctatgttcctgtccgacaacccaaatccaaagtgtggcaagggaggacacgcagcatactcctctgccgtgaacatcctgctgggacacggaaccagggtgggagccacatacttcatgacctaccacacagtgctgcagacctccgccgacttcatcgatgccctgaagaaggccaggctgatcgcctctaacgtgaccgagacaatgggcatcaatggctctgcctatcgcgtgtttccctacagcgtgttttacgtgttctatgagcagtacctgaccatcatcgacgatacaatctttaacctgggcgtgagcctgggcgccatcttcctggtgaccatggtgctgctgggatgcgagctgtggtccgccgtgatcatgtgcgccacaatcgccatggtgctggtgaatatgttcggcgtgatgtggctgtggggcatcagcctgaacgccgtgtccctggtgaacctggtcatgtcttgcggcatcagcgtggagttttgtagccacatcaccagagccttcacagtgtccatgaagggctctcgggtggagagagcagaggaggccctggcacacatgggcagctccgtgttttctggcatcaccctgacaaagttcggcggcatcgtggtgctggcctttgccaagagccagatcttccagatcttttatttccggatgtacctggcaatggtgctgctgggagcaacccacggcctgatctttctgcccgtgctgctgtcttatatcggccctagcgtgaacaaggccaagtcctgcgccaccgaggagagatacaagggcacagagcgggagagactgctgaatttctgactcgaggacggggtgaactacgcctgaggatccgatctttttccctctgccaaaaattatggggacatcatgaagccccttgagcatctgacttctggctaataaaggaaatttattttcattgcaatagtgtgttggaattttttgtgtctctcactcggcctaggtagataagtagcatggcgggttaatcattaactacaaggaacccctagtgatggagttggccactccctctctgcgcgctcgctcgctcactgaggccgggcgaccaaaggtcgcccgacgcccgggctttgcccgggcggcctcagtgagcgagcgagcgcgcag

SEQ ID NO: 1802 - DNA, 4777 bp, Artificial Sequence
  source: /note="Description of Artificial Sequence: Synthetic polynucleotide"
ctgcgcgctcgctcgctcactgaggccgcccgggcaaagcccgggcgtcgggcgacctttggtcgcccggcctcagtgagcgagcgagcgcgcagagagggagtggccaactccatcactaggggttccttgtagttaatgattaacccgccatgctacttatctaccagggtaatggggatcctctagaactatagctaacgcgtgctattaccatggtgatgcggttttggcagtacatcaatgggcgtggatagcggtttgactcacggggatttccaagtctccaccccattgacgtcaatgggagtttgttttggcaccaaaatcaacgggactttccaaaatgtcgtaacaactccgccccattgacgcaaatgggcggtaggcgtgtacggtgggaggtctatataagcagagctccgggagcaagcttcgtttagtgaaccggtaagtatcaaggttacaagacaggtttaaggagaccaatagaaactgggcttgtcgagacagagaagactcttgcgtttctgataggcacctattggtcttactgacatccactttgcctttctctccacaggggattcgaaccggtgccgccaccatgaccgccaggggcctggccctgggactgctgctgctgctgctgtgcccagcccaggtgttctctcagagctgcgtgtggtatggcgagtgtggcatcgcctacggcgacaagcggtacaactgcgagtacagcggaccacctaagccactgccaaaggacggctacgatctggtgcaggagctgtgccctggcttctttttcggcaacgtgtccctgtgctgtgacgtgcggcagctgcagaccctgaaggataatctgcagctgcctctgcagtttctgtctagatgcccaagctgtttttataacctgctgaatctgttctgcgagctgacctgttccccaaggcagtctcagttcctgaacgtgaccgccacagaggactacgtggatcccgtgacaaaccagaccaagacaaatgtgaaggagctgcagtactatgtgggccagagcttcgccaacgccatgtataatgcatgcagggacgtggaggcacccagctccaatgataaggccctgggactgctgtgcggcaaggacgcagatgcctgtaacgccaccaattggatcgagtacatgtttaacaaggataatggccaggcccctttcaccatcacaccagtgttttccgacttccccgtgcacggcatggagcctatgaacaatgccaccaagggctgcgacgagtctgtggatgaggtgacagccccttgcagctgtcaggattgctccatcgtgtgcggacctaagccacagccaccacctccaccagcaccatggaccatcctgggactggacgccatgtatgtgatcatgtggatcacatacatggcctttctgctggtgtttttcggcgcctttttcgccgtgtggtgctatcggaagagatacttcgtgagcgagtacacccccatcgacagcaacatcgccttcagcgtgaatgcctccgacaagggcgaggcatcctgctgtgatcccgtgagcgccgccttcgagggatgcctgcggagactgtttacccggtggggctctttctgcgtgagaaacccaggctgcgtgatctttttcagcctggtgtttatcacagcctgttctagcggcctggtgttcgtgagggtgaccacaaatccagtggatctgtggagcgccccctcctctcaggcaaggctggagaaggagtactttgaccagcacttcggcccatttttcaggaccgagcagctgatcatcagggcaccactgacagataagcacatctaccagccatatcctagcggagcagacgtgcccttcggccctccactggatatccagatcctgcaccaggtgctggacctgcagatcgccatcgagaacatcaccgcctcctatgacaatgagaccgtgacactgcaggatatctgcctggcccctctgagcccatataacaccaattgtacaatcctgtccgtgctgaactactttcagaattcccactctgtgctggatcacaagaagggcgacgacttcttcgtgtacgccgactatcacacccacttcctgtactgcgtgcgggcccctgcctctctgaacgacaccagcctgctgcacgatccatgtctgggcacatttggcggccccgtgttcccttggctggtgctgggcggctatgacgatcagaactacaacaatgccaccgccctggtcatcaccttccctgtgaacaattactataatgataccgagaagctgcagagagcccaggcctgggagaaggagtttatcaacttcgtgaagaattacaagaacccaaatctgaccatcagcttcacagccgagcggtccatcgaggacgagctgaacagagagagcgactccgacgtgttcaccgtggtcatcagctatgccatcatgttcctgtacatcagcctggccctgggccacatcaagtcctgcaggcgcctgctggtggatagcaaggtgtccctgggcatcgccggcatcctgatcgtgctgagctccgtggcctgttccctgggcgtgttctcttatatcggcctgcctctgaccctgatcgtgatcgaagtgatcccatttctggtgctggccgtgggcgtggacaatatcttcatcctggtgcaggcataccagagggacgagcgcctgcagggagagacactggatcagcagctgggaagggtgctgggagaggtggcaccatccatgtttctgtctagcttctctgagaccgtggcctttttcctgggcgccctgtccgtgatgccagcagtgcacacattttctctgttcgccggcctggccgtgtttatcgacttcctgctgcagatcacctgcttcgtgagcctgctgggcctggacatcaagaggcaggagaagaaccgcctggatatcttctgctgcgtgcggggagcagaggacggcacatccgtgcaggcctctgagagctgtctgttccggtttttcaagaattcctattctccactgctgctgaaggactggatgagacccatcgtgatcgccatctttgtgggcgtgctgagcttctccatcgccgtgctgaacaaggtggacatcggcctggatcagtctctgagcatgcccgacgatagctatatggtggattactttaagtccatctctcagtatctgcacgcaggaccccccgtgtacttcgtgctggaggagggccacgactacacctcctctaagggccagaatatggtgtgcggcggcatgggctgtaacaatgattccctggtgcagcagatcttcaacgccgcccagctggacaattatacacggatcggctttgcccccagctcctggatcgacgattacttcgattgggtgaagcctcagtctagctgctgtagagtggacaacatcaccgatcagttttgcaatgcaagcgtggtggaccctgcatgcgtgaggtgtaggccactgacaccagagggcaagcagaggccacagggaggcgacttcatgcgcttcctgcctatgttcctgtccgacaacccaaatccaaagtgtggcaagggaggacacgcagcatactcctctgccgtgaacatcctgctgggacacggaaccagggtgggagccacatacttcatgacctaccacacagtgctgcagacctccgccgacttcatcgatgccctgaagaaggccaggctgatcgcctctaacgtgaccgagacaatgggcatcaatggctctgcctatcgcgtgtttccctacagcgtgttttacgtgttctatgagcagtacctgaccatcatcgacgatacaatctttaacctgggcgtgagcctgggcgccatcttcctggtgaccatggtgctgctgggatgcgagctgtggtccgccgtgatcatgtgcgccacaatcgccatggtgctggtgaatatgttcggcgtgatgtggctgtggggcatcagcctgaacgccgtgtccctggtgaacctggtcatgtcttgcggcatcagcgtggagttttgtagccacatcaccagagccttcacagtgtccatgaagggctctcgggtggagagagcagaggaggccctggcacacatgggcagctccgtgttttctggcatcaccctgacaaagttcggcggcatcgtggtgctggcctttgccaagagccagatcttccagatcttttatttccggatgtacctggcaatggtgctgctgggagcaacccacggcctgatctttctgcccgtgctgctgtcttatatcggccctagcgtgaacaaggccaagtcctgcgccaccgaggagagatacaagggcacagagcgggagagactgctgaatttctgactcgaggacggggtgaactacgcctgaggatccgatctttttccctctgccaaaaattatggggacatcatgaagccccttgagcatctgacttctggctaataaaggaaatttattttcattgcaatagtgtgttggaattttttgtgtctctcactcggcctaggtagataagtagcatggcgggttaatcattaactacaaggaacccctagtgatggagttggccactccctctctgcgcgctcgctcgctcactgaggccgggcgaccaaaggtcgcccgacgcccgggctttgcccgggcggcctcagtgagcgagcgagcgcgcag

SEQ ID NO: 1803 - DNA, 4672 bp, Artificial Sequence
  source: /note="Description of Artificial Sequence: Synthetic polynucleotide"
ctgcgcgctcgctcgctcactgaggccgcccgggcaaagcccgggcgtcgggcgacctttggtcgcccggcctcagtgagcgagcgagcgcgcagagagggagtggccaactccatcactaggggttccttgtagttaatgattaacccgccatgctacttatctaccagggtaatggggatcctctagaactatagctaacgcgtccacgttctgcttcactctccccatctcccccccctccccacccccaattttgtatttatttattttttaattattttgtgcagcgatgggggcggggggggggggcgcgcgccaggcggggcggggcggggcgaggggcggggcggggcgaggcggagaggtgcggcggcagccaatcagagcggcgcgctccgaaagtttccttttatggcgaggcggcggcggcggcggccctataaaaagcgaagcgcgcggcgggcgggagcaagcttcgtttcgaaccggtgccgccaccatgaccgccaggggcctggccctgggactgctgctgctgctgctgtgcccagcccaggtgttctctcagagctgcgtgtggtatggcgagtgtggcatcgcctacggcgacaagcggtacaactgcgagtacagcggaccacctaagccactgccaaaggacggctacgatctggtgcaggagctgtgccctggcttctttttcggcaacgtgtccctgtgctgtgacgtgcggcagctgcagaccctgaaggataatctgcagctgcctctgcagtttctgtctagatgcccaagctgtttttataacctgctgaatctgttctgcgagctgacctgttccccaaggcagtctcagttcctgaacgtgaccgccacagaggactacgtggatcccgtgacaaaccagaccaagacaaatgtgaaggagctgcagtactatgtgggccagagcttcgccaacgccatgtataatgcatgcagggacgtggaggcacccagctccaatgataaggccctgggactgctgtgcggcaaggacgcagatgcctgtaacgccaccaattggatcgagtacatgtttaacaaggataatggccaggcccctttcaccatcacaccagtgttttccgacttccccgtgcacggcatggagcctatgaacaatgccaccaagggctgcgacgagtctgtggatgaggtgacagccccttgcagctgtcaggattgctccatcgtgtgcggacctaagccacagccaccacctccaccagcaccatggaccatcctgggactggacgccatgtatgtgatcatgtggatcacatacatggcctttctgctggtgtttttcggcgcctttttcgccgtgtggtgctatcggaagagatacttcgtgagcgagtacacccccatcgacagcaacatcgccttcagcgtgaatgcctccgacaagggcgaggcatcctgctgtgatcccgtgagcgccgccttcgagggatgcctgcggagactgtttacccggtggggctctttctgcgtgagaaacccaggctgcgtgatctttttcagcctggtgtttatcacagcctgttctagcggcctggtgttcgtgagggtgaccacaaatccagtggatctgtggagcgccccctcctctcaggcaaggctggagaaggagtactttgaccagcacttcggcccatttttcaggaccgagcagctgatcatcagggcaccactgacagataagcacatctaccagccatatcctagcggagcagacgtgcccttcggccctccactggatatccagatcctgcaccaggtgctggacctgcagatcgccatcgagaacatcaccgcctcctatgacaatgagaccgtgacactgcaggatatctgcctggcccctctgagcccatataacaccaattgtacaatcctgtccgtgctgaactactttcagaattcccactctgtgctggatcacaagaagggcgacgacttcttcgtgtacgccgactatcacacccacttcctgtactgcgtgcgggcccctgcctctctgaacgacaccagcctgctgcacgatccatgtctgggcacatttggcggccccgtgttcccttggctggtgctgggcggctatgacgatcagaactacaacaatgccaccgccctggtcatcaccttccctgtgaacaattactataatgataccgagaagctgcagagagcccaggcctgggagaaggagtttatcaacttcgtgaagaattacaagaacccaaatctgaccatcagcttcacagccgagcggtccatcgaggacgagctgaacagagagagcgactccgacgtgttcaccgtggtcatcagctatgccatcatgttcctgtacatcagcctggccctgggccacatcaagtcctgcaggcgcctgctggtggatagcaaggtgtccctgggcatcgccggcatcctgatcgtgctgagctccgtggcctgttccctgggcgtgttctcttatatcggcctgcctctgaccctgatcgtgatcgaagtgatcccatttctggtgctggccgtgggcgtggacaatatcttcatcctggtgcaggcataccagagggacgagcgcctgcagggagagacactggatcagcagctgggaagggtgctgggagaggtggcaccatccatgtttctgtctagcttctctgagaccgtggcctttttcctgggcgccctgtccgtgatgccagcagtgcacacattttctctgttcgccggcctggccgtgtttatcgacttcctgctgcagatcacctgcttcgtgagcctgctgggcctggacatcaagaggcaggagaagaaccgcctggatatcttctgctgcgtgcggggagcagaggacggcacatccgtgcaggcctctgagagctgtctgttccggtttttcaagaattcctattctccactgctgctgaaggactggatgagacccatcgtgatcgccatctttgtgggcgtgctgagcttctccatcgccgtgctgaacaaggtggacatcggcctggatcagtctctgagcatgcccgacgatagctatatggtggattactttaagtccatctctcagtatctgcacgcaggaccccccgtgtacttcgtgctggaggagggccacgactacacctcctctaagggccagaatatggtgtgcggcggcatgggctgtaacaatgattccctggtgcagcagatcttcaacgccgcccagctggacaattatacacggatcggctttgcccccagctcctggatcgacgattacttcgattgggtgaagcctcagtctagctgctgtagagtggacaacatcaccgatcagttttgcaatgcaagcgtggtggaccctgcatgcgtgaggtgtaggccactgacaccagagggcaagcagaggccacagggaggcgacttcatgcgcttcctgcctatgttcctgtccgacaacccaaatccaaagtgtggcaagggaggacacgcagcatactcctctgccgtgaacatcctgctgggacacggaaccagggtgggagccacatacttcatgacctaccacacagtgctgcagacctccgccgacttcatcgatgccctgaagaaggccaggctgatcgcctctaacgtgaccgagacaatgggcatcaatggctctgcctatcgcgtgtttccctacagcgtgttttacgtgttctatgagcagtacctgaccatcatcgacgatacaatctttaacctgggcgtgagcctgggcgccatcttcctggtgaccatggtgctgctgggatgcgagctgtggtccgccgtgatcatgtgcgccacaatcgccatggtgctggtgaatatgttcggcgtgatgtggctgtggggcatcagcctgaacgccgtgtccctggtgaacctggtcatgtcttgcggcatcagcgtggagttttgtagccacatcaccagagccttcacagtgtccatgaagggctctcgggtggagagagcagaggaggccctggcacacatgggcagctccgtgttttctggcatcaccctgacaaagttcggcggcatcgtggtgctggcctttgccaagagccagatcttccagatcttttatttccggatgtacctggcaatggtgctgctgggagcaacccacggcctgatctttctgcccgtgctgctgtcttatatcggccctagcgtgaacaaggccaagtcctgcgccaccgaggagagatacaagggcacagagcgggagagactgctgaatttctgactcgaggacggggtgaactacgcctgaggatccgatctttttccctctgccaaaaattatggggacatcatgaagccccttgagcatctgacttctggctaataaaggaaatttattttcattgcaatagtgtgttggaattttttgtgtctctcactcggcctaggtagataagtagcatggcgggttaatcattaactacaaggaacccctagtgatggagttggccactccctctctgcgcgctcgctcgctcactgaggccgggcgaccaaaggtcgcccgacgcccgggctttgcccgggcggcctcagtgagcgagcgagcgcgcag

SEQ ID NO: 1804 - DNA, 4787 bp, Artificial Sequence
  source: /note="Description of Artificial Sequence: Synthetic polynucleotide"
ctgcgcgctcgctcgctcactgaggccgcccgggcaaagcccgggcgtcgggcgacctttggtcgcccggcctcagtgagcgagcgagcgcgcagagagggagtggccaactccatcactaggggttccttgtagttaatgattaacccgccatgctacttatctaccagggtaatggggatcctctagaactatagctaacgcgtgcccgtcagtgggcagagcgcacatcgcccacagtccccgagaagttggggggaggggtcggcaattgaaccggtgcctagagaaggtggcgcggggtaaactgggaaagtgatgtcgtgtactggctccgcctttttcccgagggtgggggagaaccgtatataagtgcagtagtcgccgtgaacgttctttttcgcaacgggtttgccgccagaacacgcgtaagcgggagcaagcttcgtttagtgaaccggtaagtatcaaggttacaagacaggtttaaggagaccaatagaaactgggcttgtcgagacagagaagactcttgcgtttctgataggcacctattggtcttactgacatccactttgcctttctctccacaggggattcgaaccggtgccgccaccatgaccgccaggggcctggccctgggactgctgctgctgctgctgtgcccagcccaggtgttctctcagagctgcgtgtggtatggcgagtgtggcatcgcctacggcgacaagcggtacaactgcgagtacagcggaccacctaagccactgccaaaggacggctacgatctggtgcaggagctgtgccctggcttctttttcggcaacgtgtccctgtgctgtgacgtgcggcagctgcagaccctgaaggataatctgcagctgcctctgcagtttctgtctagatgcccaagctgtttttataacctgctgaatctgttctgcgagctgacctgttccccaaggcagtctcagttcctgaacgtgaccgccacagaggactacgtggatcccgtgacaaaccagaccaagacaaatgtgaaggagctgcagtactatgtgggccagagcttcgccaacgccatgtataatgcatgcagggacgtggaggcacccagctccaatgataaggccctgggactgctgtgcggcaaggacgcagatgcctgtaacgccaccaattggatcgagtacatgtttaacaaggataatggccaggcccctttcaccatcacaccagtgttttccgacttccccgtgcacggcatggagcctatgaacaatgccaccaagggctgcgacgagtctgtggatgaggtgacagccccttgcagctgtcaggattgctccatcgtgtgcggacctaagccacagccaccacctccaccagcaccatggaccatcctgggactggacgccatgtatgtgatcatgtggatcacatacatggcctttctgctggtgtttttcggcgcctttttcgccgtgtggtgctatcggaagagatacttcgtgagcgagtacacccccatcgacagcaacatcgccttcagcgtgaatgcctccgacaagggcgaggcatcctgctgtgatcccgtgagcgccgccttcgagggatgcctgcggagactgtttacccggtggggctctttctgcgtgagaaacccaggctgcgtgatctttttcagcctggtgtttatcacagcctgttctagcggcctggtgttcgtgagggtgaccacaaatccagtggatctgtggagcgccccctcctctcaggcaaggctggagaaggagtactttgaccagcacttcggcccatttttcaggaccgagcagctgatcatcagggcaccactgacagataagcacatctaccagccatatcctagcggagcagacgtgcccttcggccctccactggatatccagatcctgcaccaggtgctggacctgcagatcgccatcgagaacatcaccgcctcctatgacaatgagaccgtgacactgcaggatatctgcctggcccctctgagcccatataacaccaattgtacaatcctgtccgtgctgaactactttcagaattcccactctgtgctggatcacaagaagggcgacgacttcttcgtgtacgccgactatcacacccacttcctgtactgcgtgcgggcccctgcctctctgaacgacaccagcctgctgcacgatccatgtctgggcacatttggcggccccgtgttcccttggctggtgctgggcggctatgacgatcagaactacaacaatgccaccgccctggtcatcaccttccctgtgaacaattactataatgataccgagaagctgcagagagcccaggcctgggagaaggagtttatcaacttcgtgaagaattacaagaacccaaatctgaccatcagcttcacagccgagcggtccatcgaggacgagctgaacagagagagcgactccgacgtgttcaccgtggtcatcagctatgccatcatgttcctgtacatcagcctggccctgggccacatcaagtcctgcaggcgcctgctggtggatagcaaggtgtccctgggcatcgccggcatcctgatcgtgctgagctccgtggcctgttccctgggcgtgttctcttatatcggcctgcctctgaccctgatcgtgatcgaagtgatcccatttctggtgctggccgtgggcgtggacaatatcttcatcctggtgcaggcataccagagggacgagcgcctgcagggagagacactggatcagcagctgggaagggtgctgggagaggtggcaccatccatgtttctgtctagcttctctgagaccgtggcctttttcctgggcgccctgtccgtgatgccagcagtgcacacattttctctgttcgccggcctggccgtgtttatcgacttcctgctgcagatcacctgcttcgtgagcctgctgggcctggacatcaagaggcaggagaagaaccgcctggatatcttctgctgcgtgcggggagcagaggacggcacatccgtgcaggcctctgagagctgtctgttccggtttttcaagaattcctattctccactgctgctgaaggactggatgagacccatcgtgatcgccatctttgtgggcgtgctgagcttctccatcgccgtgctgaacaaggtggacatcggcctggatcagtctctgagcatgcccgacgatagctatatggtggattactttaagtccatctctcagtatctgcacgcaggaccccccgtgtacttcgtgctggaggagggccacgactacacctcctctaagggccagaatatggtgtgcggcggcatgggctgtaacaatgattccctggtgcagcagatcttcaacgccgcccagctggacaattatacacggatcggctttgcccccagctcctggatcgacgattacttcgattgggtgaagcctcagtctagctgctgtagagtggacaacatcaccgatcagttttgcaatgcaagcgtggtggaccctgcatgcgtgaggtgtaggccactgacaccagagggcaagcagaggccacagggaggcgacttcatgcgcttcctgcctatgttcctgtccgacaacccaaatccaaagtgtggcaagggaggacacgcagcatactcctctgccgtgaacatcctgctgggacacggaaccagggtgggagccacatacttcatgacctaccacacagtgctgcagacctccgccgacttcatcgatgccctgaagaaggccaggctgatcgcctctaacgtgaccgagacaatgggcatcaatggctctgcctatcgcgtgtttccctacagcgtgttttacgtgttctatgagcagtacctgaccatcatcgacgatacaatctttaacctgggcgtgagcctgggcgccatcttcctggtgaccatggtgctgctgggatgcgagctgtggtccgccgtgatcatgtgcgccacaatcgccatggtgctggtgaatatgttcggcgtgatgtggctgtggggcatcagcctgaacgccgtgtccctggtgaacctggtcatgtcttgcggcatcagcgtggagttttgtagccacatcaccagagccttcacagtgtccatgaagggctctcgggtggagagagcagaggaggccctggcacacatgggcagctccgtgttttctggcatcaccctgacaaagttcggcggcatcgtggtgctggcctttgccaagagccagatcttccagatcttttatttccggatgtacctggcaatggtgctgctgggagcaacccacggcctgatctttctgcccgtgctgctgtcttatatcggccctagcgtgaacaaggccaagtcctgcgccaccgaggagagatacaagggcacagagcgggagagactgctgaatttctgactcgaggacggggtgaactacgcctgaggatccgatctttttccctctgccaaaaattatggggacatcatgaagccccttgagcatctgacttctggctaataaaggaaatttattttcattgcaatagtgtgttggaattttttgtgtctctcactcggcctaggtagataagtagcatggcgggttaatcattaactacaaggaacccctagtgatggagttggccactccctctctgcgcgctcgctcgctcactgaggccgggcgaccaaaggtcgcccgacgcccgggctttgcccgggcggcctcagtgagcgagcgagcgcgcag

SEQ ID NO: 1805 - DNA, 4672 bp, Artificial Sequence
  source: /note="Description of Artificial Sequence: Synthetic polynucleotide"
ctgcgcgctcgctcgctcactgaggccgcccgggcaaagcccgggcgtcgggcgacctttggtcgcccggcctcagtgagcgagcgagcgcgcagagagggagtggccaactccatcactaggggttccttgtagttaatgattaacccgccatgctacttatctaccagggtaatggggatcctctagaactatagctaacgcgtccacgttctgcttcactctccccatctcccccccctccccacccccaattttgtatttatttattttttaattattttgtgcagcgatgggggcggggggggggggcgcgcgccaggcggggcggggcggggcgaggggcggggcggggcgaggcggagaggtgcggcggcagccaatcagagcggcgcgctccgaaagtttccttttatggcgaggcggcggcggcggcggccctataaaaagcgaagcgcgcggcgggcgggagcaagcttcgtttcgaaccggtgccgccaccatgaccgccagaggcctggccctgggcctgctgctgctgctgctgtgccccgcccaggtgttcagccagagctgcgtgtggtacggcgagtgcggcatcgcctacggcgacaagagatacaactgcgagtacagcggcccccccaagcccctgcccaaggacggctacgacctggtgcaggagctgtgccccggcttcttcttcggcaacgtgagcctgtgctgcgacgtgagacagctgcagaccctgaaggacaacctgcagctgcccctgcagttcctgagcagatgccccagctgcttctacaacctgctgaacctgttctgcgagctgacctgcagccccagacagagccagttcctgaacgtgaccgccaccgaggactacgtggaccccgtgaccaaccagaccaagaccaacgtgaaggagctgcagtactacgtgggccagagcttcgccaacgccatgtacaacgcctgcagagacgtggaggcccccagcagcaacgacaaggccctgggcctgctgtgcggcaaggacgccgacgcctgcaacgccaccaactggatcgagtacatgttcaacaaggacaacggccaggcccccttcaccatcacccccgtgttcagcgacttccccgtgcacggcatggagcccatgaacaacgccaccaagggctgcgacgagagcgtggacgaggtgaccgccccctgcagctgccaggactgcagcatcgtgtgcggccccaagccccagcccccccccccccccgccccctggaccatcctgggcctggacgccatgtacgtgatcatgtggatcacctacatggccttcctgctggtgttcttcggcgccttcttcgccgtgtggtgctacagaaagagatacttcgtgagcgagtacacccccatcgacagcaacatcgccttcagcgtgaacgccagcgacaagggcgaggccagctgctgcgaccccgtgagcgccgccttcgagggctgcctgagaagactgttcaccagatggggcagcttctgcgtgagaaaccccggctgcgtgatcttcttcagcctggtgttcatcaccgcctgcagcagcggcctggtgttcgtgagagtgaccaccaaccccgtggacctgtggagcgcccccagcagccaggccagactggagaaggagtacttcgaccagcacttcggccccttcttcagaaccgagcagctgatcatcagagcccccctgaccgacaagcacatctaccagccctaccccagcggcgccgacgtgcccttcggcccccccctggacatccagatcctgcaccaggtgctggacctgcagatcgccatcgagaacatcaccgccagctacgacaacgagaccgtgaccctgcaggacatctgcctggcccccctgagcccctacaacaccaactgcaccatcctgagcgtgctgaactacttccagaacagccacagcgtgctggaccacaagaagggcgacgacttcttcgtgtacgccgactaccacacccacttcctgtactgcgtgagagcccccgccagcctgaacgacaccagcctgctgcacgacccctgcctgggcaccttcggcggccccgtgttcccctggctggtgctgggcggctacgacgaccagaactacaacaacgccaccgccctggtgatcaccttccccgtgaacaactactacaacgacaccgagaagctgcagagagcccaggcctgggagaaggagttcatcaacttcgtgaagaactacaagaaccccaacctgaccatcagcttcaccgccgagagaagcatcgaggacgagctgaacagagagagcgacagcgacgtgttcaccgtggtgatcagctacgccatcatgttcctgtacatcagcctggccctgggccacatcaagagctgcagaagactgctggtggacagcaaggtgagcctgggcatcgccggcatcctgatcgtgctgagcagcgtggcctgcagcctgggcgtgttcagctacatcggcctgcccctgaccctgatcgtgatcgaggtgatccccttcctggtgctggccgtgggcgtggacaacatcttcatcctggtgcaggcctaccagagagacgagagactgcagggcgagaccctggaccagcagctgggcagagtgctgggcgaggtggcccccagcatgttcctgagcagcttcagcgagaccgtggccttcttcctgggcgccctgagcgtgatgcccgccgtgcacaccttcagcctgttcgccggcctggccgtgttcatcgacttcctgctgcagatcacctgcttcgtgagcctgctgggcctggacatcaagagacaggagaagaacagactggacatcttctgctgcgtgagaggcgccgaggacggcaccagcgtgcaggccagcgagagctgcctgttcagattcttcaagaacagctacagccccctgctgctgaaggactggatgagacccatcgtgatcgccatcttcgtgggcgtgctgagcttcagcatcgccgtgctgaacaaggtggacatcggcctggaccagagcctgagcatgcccgacgacagctacatggtggactacttcaagagcatcagccagtacctgcacgccggcccccccgtgtacttcgtgctggaggagggccacgactacaccagcagcaagggccagaacatggtgtgcggcggcatgggctgcaacaacgacagcctggtgcagcagatcttcaacgccgcccagctggacaactacaccagaatcggcttcgcccccagcagctggatcgacgactacttcgactgggtgaagccccagagcagctgctgcagagtggacaacatcaccgaccagttctgcaacgccagcgtggtggaccccgcctgcgtgagatgcagacccctgacccccgagggcaagcagagaccccagggcggcgacttcatgagattcctgcccatgttcctgagcgacaaccccaaccccaagtgcggcaagggcggccacgccgcctacagcagcgccgtgaacatcctgctgggccacggcaccagagtgggcgccacctacttcatgacctaccacaccgtgctgcagaccagcgccgacttcatcgacgccctgaagaaggccagactgatcgccagcaacgtgaccgagaccatgggcatcaacggcagcgcctacagagtgttcccctacagcgtgttctacgtgttctacgagcagtacctgaccatcatcgacgacaccatcttcaacctgggcgtgagcctgggcgccatcttcctggtgaccatggtgctgctgggctgcgagctgtggagcgccgtgatcatgtgcgccaccatcgccatggtgctggtgaacatgttcggcgtgatgtggctgtggggcatcagcctgaacgccgtgagcctggtgaacctggtgatgagctgcggcatcagcgtggagttctgcagccacatcaccagagccttcaccgtgagcatgaagggcagcagagtggagagagccgaggaggccctggcccacatgggcagcagcgtgttcagcggcatcaccctgaccaagttcggcggcatcgtggtgctggccttcgccaagagccagatcttccagatcttctacttcagaatgtacctggccatggtgctgctgggcgccacccacggcctgatcttcctgcccgtgctgctgagctacatcggccccagcgtgaacaaggccaagagctgcgccaccgaggagagatacaagggcaccgagagagagagactgctgaacttctgactcgaggacggggtgaactacgcctgaggatccgatctttttccctctgccaaaaattatggggacatcatgaagccccttgagcatctgacttctggctaataaaggaaatttattttcattgcaatagtgtgttggaattttttgtgtctctcactcggcctaggtagataagtagcatggcgggttaatcattaactacaaggaacccctagtgatggagttggccactccctctctgcgcgctcgctcgctcactgaggccgggcgaccaaaggtcgcccgacgcccgggctttgcccgggcggcctcagtgagcgagcgagcgcgcag

SEQ ID NO: 1806 - DNA, 4629 bp, Artificial Sequence
  source: /note="Description of Artificial Sequence: Synthetic polynucleotide"
ctgcgcgctcgctcgctcactgaggccgcccgggcaaagcccgggcgtcgggcgacctttggtcgcccggcctcagtgagcgagcgagcgcgcagagagggagtggccaactccatcactaggggttccttgtagttaatgattaacccgccatgctacttatctaccagggtaatggggatcctctagaactatagctaacgcgtgctattaccatggtgatgcggttttggcagtacatcaatgggcgtggatagcggtttgactcacggggatttccaagtctccaccccattgacgtcaatgggagtttgttttggcaccaaaatcaacgggactttccaaaatgtcgtaacaactccgccccattgacgcaaatgggcggtaggcgtgtacggtgggaggtctatataagcagagctccgggagcaagcttcgtttcgaaccggtgccgccaccatgaccgccagaggcctggccctgggcctgctgctgctgctgctgtgccccgcccaggtgttcagccagagctgcgtgtggtacggcgagtgcggcatcgcctacggcgacaagagatacaactgcgagtacagcggcccccccaagcccctgcccaaggacggctacgacctggtgcaggagctgtgccccggcttcttcttcggcaacgtgagcctgtgctgcgacgtgagacagctgcagaccctgaaggacaacctgcagctgcccctgcagttcctgagcagatgccccagctgcttctacaacctgctgaacctgttctgcgagctgacctgcagccccagacagagccagttcctgaacgtgaccgccaccgaggactacgtggaccccgtgaccaaccagaccaagaccaacgtgaaggagctgcagtactacgtgggccagagcttcgccaacgccatgtacaacgcctgcagagacgtggaggcccccagcagcaacgacaaggccctgggcctgctgtgcggcaaggacgccgacgcctgcaacgccaccaactggatcgagtacatgttcaacaaggacaacggccaggcccccttcaccatcacccccgtgttcagcgacttccccgtgcacggcatggagcccatgaacaacgccaccaagggctgcgacgagagcgtggacgaggtgaccgccccctgcagctgccaggactgcagcatcgtgtgcggccccaagccccagcccccccccccccccgccccctggaccatcctgggcctggacgccatgtacgtgatcatgtggatcacctacatggccttcctgctggtgttcttcggcgccttcttcgccgtgtggtgctacagaaagagatacttcgtgagcgagtacacccccatcgacagcaacatcgccttcagcgtgaacgccagcgacaagggcgaggccagctgctgcgaccccgtgagcgccgccttcgagggctgcctgagaagactgttcaccagatggggcagcttctgcgtgagaaaccccggctgcgtgatcttcttcagcctggtgttcatcaccgcctgcagcagcggcctggtgttcgtgagagtgaccaccaaccccgtggacctgtggagcgcccccagcagccaggccagactggagaaggagtacttcgaccagcacttcggccccttcttcagaaccgagcagctgatcatcagagcccccctgaccgacaagcacatctaccagccctaccccagcggcgccgacgtgcccttcggcccccccctggacatccagatcctgcaccaggtgctggacctgcagatcgccatcgagaacatcaccgccagctacgacaacgagaccgtgaccctgcaggacatctgcctggcccccctgagcccctacaacaccaactgcaccatcctgagcgtgctgaactacttccagaacagccacagcgtgctggaccacaagaagggcgacgacttcttcgtgtacgccgactaccacacccacttcctgtactgcgtgagagcccccgccagcctgaacgacaccagcctgctgcacgacccctgcctgggcaccttcggcggccccgtgttcccctggctggtgctgggcggctacgacgaccagaactacaacaacgccaccgccctggtgatcaccttccccgtgaacaactactacaacgacaccgagaagctgcagagagcccaggcctgggagaaggagttcatcaacttcgtgaagaactacaagaaccccaacctgaccatcagcttcaccgccgagagaagcatcgaggacgagctgaacagagagagcgacagcgacgtgttcaccgtggtgatcagctacgccatcatgttcctgtacatcagcctggccctgggccacatcaagagctgcagaagactgctggtggacagcaaggtgagcctgggcatcgccggcatcctgatcgtgctgagcagcgtggcctgcagcctgggcgtgttcagctacatcggcctgcccctgaccctgatcgtgatcgaggtgatccccttcctggtgctggccgtgggcgtggacaacatcttcatcctggtgcaggcctaccagagagacgagagactgcagggcgagaccctggaccagcagctgggcagagtgctgggcgaggtggcccccagcatgttcctgagcagcttcagcgagaccgtggccttcttcctgggcgccctgagcgtgatgcccgccgtgcacaccttcagcctgttcgccggcctggccgtgttcatcgacttcctgctgcagatcacctgcttcgtgagcctgctgggcctggacatcaagagacaggagaagaacagactggacatcttctgctgcgtgagaggcgccgaggacggcaccagcgtgcaggccagcgagagctgcctgttcagattcttcaagaacagctacagccccctgctgctgaaggactggatgagacccatcgtgatcgccatcttcgtgggcgtgctgagcttcagcatcgccgtgctgaacaaggtggacatcggcctggaccagagcctgagcatgcccgacgacagctacatggtggactacttcaagagcatcagccagtacctgcacgccggcccccccgtgtacttcgtgctggaggagggccacgactacaccagcagcaagggccagaacatggtgtgcggcggcatgggctgcaacaacgacagcctggtgcagcagatcttcaacgccgcccagctggacaactacaccagaatcggcttcgcccccagcagctggatcgacgactacttcgactgggtgaagccccagagcagctgctgcagagtggacaacatcaccgaccagttctgcaacgccagcgtggtggaccccgcctgcgtgagatgcagacccctgacccccgagggcaagcagagaccccagggcggcgacttcatgagattcctgcccatgttcctgagcgacaaccccaaccccaagtgcggcaagggcggccacgccgcctacagcagcgccgtgaacatcctgctgggccacggcaccagagtgggcgccacctacttcatgacctaccacaccgtgctgcagaccagcgccgacttcatcgacgccctgaagaaggccagactgatcgccagcaacgtgaccgagaccatgggcatcaacggcagcgcctacagagtgttcccctacagcgtgttctacgtgttctacgagcagtacctgaccatcatcgacgacaccatcttcaacctgggcgtgagcctgggcgccatcttcctggtgaccatggtgctgctgggctgcgagctgtggagcgccgtgatcatgtgcgccaccatcgccatggtgctggtgaacatgttcggcgtgatgtggctgtggggcatcagcctgaacgccgtgagcctggtgaacctggtgatgagctgcggcatcagcgtggagttctgcagccacatcaccagagccttcaccgtgagcatgaagggcagcagagtggagagagccgaggaggccctggcccacatgggcagcagcgtgttcagcggcatcaccctgaccaagttcggcggcatcgtggtgctggccttcgccaagagccagatcttccagatcttctacttcagaatgtacctggccatggtgctgctgggcgccacccacggcctgatcttcctgcccgtgctgctgagctacatcggccccagcgtgaacaaggccaagagctgcgccaccgaggagagatacaagggcaccgagagagagagactgctgaacttctgactcgaggacggggtgaactacgcctgaggatccgatctttttccctctgccaaaaattatggggacatcatgaagccccttgagcatctgacttctggctaataaaggaaatttattttcattgcaatagtgtgttggaattttttgtgtctctcactcggcctaggtagataagtagcatggcgggttaatcattaactacaaggaacccctagtgatggagttggccactccctctctgcgcgctcgctcgctcactgaggccgggcgaccaaaggtcgcccgacgcccgggctttgcccgggcggcctcagtgagcgagcgagcgcgcag

SEQ ID NO: 1807 - DNA, 4787 bp, Artificial Sequence
  source: /note="Description of Artificial Sequence: Synthetic polynucleotide"
ctgcgcgctcgctcgctcactgaggccgcccgggcaaagcccgggcgtcgggcgacctttggtcgcccggcctcagtgagcgagcgagcgcgcagagagggagtggccaactccatcactaggggttccttgtagttaatgattaacccgccatgctacttatctaccagggtaatggggatcctctagaactatagctaacgcgtgcccgtcagtgggcagagcgcacatcgcccacagtccccgagaagttggggggaggggtcggcaattgaaccggtgcctagagaaggtggcgcggggtaaactgggaaagtgatgtcgtgtactggctccgcctttttcccgagggtgggggagaaccgtatataagtgcagtagtcgccgtgaacgttctttttcgcaacgggtttgccgccagaacacgcgtaagcgggagcaagcttcgtttagtgaaccggtaagtatcaaggttacaagacaggtttaaggagaccaatagaaactgggcttgtcgagacagagaagactcttgcgtttctgataggcacctattggtcttactgacatccactttgcctttctctccacaggggattcgaaccggtgccgccaccatgaccgccagaggcctggccctgggcctgctgctgctgctgctgtgccccgcccaggtgttcagccagagctgcgtgtggtacggcgagtgcggcatcgcctacggcgacaagagatacaactgcgagtacagcggcccccccaagcccctgcccaaggacggctacgacctggtgcaggagctgtgccccggcttcttcttcggcaacgtgagcctgtgctgcgacgtgagacagctgcagaccctgaaggacaacctgcagctgcccctgcagttcctgagcagatgccccagctgcttctacaacctgctgaacctgttctgcgagctgacctgcagccccagacagagccagttcctgaacgtgaccgccaccgaggactacgtggaccccgtgaccaaccagaccaagaccaacgtgaaggagctgcagtactacgtgggccagagcttcgccaacgccatgtacaacgcctgcagagacgtggaggcccccagcagcaacgacaaggccctgggcctgctgtgcggcaaggacgccgacgcctgcaacgccaccaactggatcgagtacatgttcaacaaggacaacggccaggcccccttcaccatcacccccgtgttcagcgacttccccgtgcacggcatggagcccatgaacaacgccaccaagggctgcgacgagagcgtggacgaggtgaccgccccctgcagctgccaggactgcagcatcgtgtgcggccccaagccccagcccccccccccccccgccccctggaccatcctgggcctggacgccatgtacgtgatcatgtggatcacctacatggccttcctgctggtgttcttcggcgccttcttcgccgtgtggtgctacagaaagagatacttcgtgagcgagtacacccccatcgacagcaacatcgccttcagcgtgaacgccagcgacaagggcgaggccagctgctgcgaccccgtgagcgccgccttcgagggctgcctgagaagactgttcaccagatggggcagcttctgcgtgagaaaccccggctgcgtgatcttcttcagcctggtgttcatcaccgcctgcagcagcggcctggtgttcgtgagagtgaccaccaaccccgtggacctgtggagcgcccccagcagccaggccagactggagaaggagtacttcgaccagcacttcggccccttcttcagaaccgagcagctgatcatcagagcccccctgaccgacaagcacatctaccagccctaccccagcggcgccgacgtgcccttcggcccccccctggacatccagatcctgcaccaggtgctggacctgcagatcgccatcgagaacatcaccgccagctacgacaacgagaccgtgaccctgcaggacatctgcctggcccccctgagcccctacaacaccaactgcaccatcctgagcgtgctgaactacttccagaacagccacagcgtgctggaccacaagaagggcgacgacttcttcgtgtacgccgactaccacacccacttcctgtactgcgtgagagcccccgccagcctgaacgacaccagcctgctgcacgacccctgcctgggcaccttcggcggccccgtgttcccctggctggtgctgggcggctacgacgaccagaactacaacaacgccaccgccctggtgatcaccttccccgtgaacaactactacaacgacaccgagaagctgcagagagcccaggcctgggagaaggagttcatcaacttcgtgaagaactacaagaaccccaacctgaccatcagcttcaccgccgagagaagcatcgaggacgagctgaacagagagagcgacagcgacgtgttcaccgtggtgatcagctacgccatcatgttcctgtacatcagcctggccctgggccacatcaagagctgcagaagactgctggtggacagcaaggtgagcctgggcatcgccggcatcctgatcgtgctgagcagcgtggcctgcagcctgggcgtgttcagctacatcggcctgcccctgaccctgatcgtgatcgaggtgatccccttcctggtgctggccgtgggcgtggacaacatcttcatcctggtgcaggcctaccagagagacgagagactgcagggcgagaccctggaccagcagctgggcagagtgctgggcgaggtggcccccagcatgttcctgagcagcttcagcgagaccgtggccttcttcctgggcgccctgagcgtgatgcccgccgtgcacaccttcagcctgttcgccggcctggccgtgttcatcgacttcctgctgcagatcacctgcttcgtgagcctgctgggcctggacatcaagagacaggagaagaacagactggacatcttctgctgcgtgagaggcgccgaggacggcaccagcgtgcaggccagcgagagctgcctgttcagattcttcaagaacagctacagccccctgctgctgaaggactggatgagacccatcgtgatcgccatcttcgtgggcgtgctgagcttcagcatcgccgtgctgaacaaggtggacatcggcctggaccagagcctgagcatgcccgacgacagctacatggtggactacttcaagagcatcagccagtacctgcacgccggcccccccgtgtacttcgtgctggaggagggccacgactacaccagcagcaagggccagaacatggtgtgcggcggcatgggctgcaacaacgacagcctggtgcagcagatcttcaacgccgcccagctggacaactacaccagaatcggcttcgcccccagcagctggatcgacgactacttcgactgggtgaagccccagagcagctgctgcagagtggacaacatcaccgaccagttctgcaacgccagcgtggtggaccccgcctgcgtgagatgcagacccctgacccccgagggcaagcagagaccccagggcggcgacttcatgagattcctgcccatgttcctgagcgacaaccccaaccccaagtgcggcaagggcggccacgccgcctacagcagcgccgtgaacatcctgctgggccacggcaccagagtgggcgccacctacttcatgacctaccacaccgtgctgcagaccagcgccgacttcatcgacgccctgaagaaggccagactgatcgccagcaacgtgaccgagaccatgggcatcaacggcagcgcctacagagtgttcccctacagcgtgttctacgtgttctacgagcagtacctgaccatcatcgacgacaccatcttcaacctgggcgtgagcctgggcgccatcttcctggtgaccatggtgctgctgggctgcgagctgtggagcgccgtgatcatgtgcgccaccatcgccatggtgctggtgaacatgttcggcgtgatgtggctgtggggcatcagcctgaacgccgtgagcctggtgaacctggtgatgagctgcggcatcagcgtggagttctgcagccacatcaccagagccttcaccgtgagcatgaagggcagcagagtggagagagccgaggaggccctggcccacatgggcagcagcgtgttcagcggcatcaccctgaccaagttcggcggcatcgtggtgctggccttcgccaagagccagatcttccagatcttctacttcagaatgtacctggccatggtgctgctgggcgccacccacggcctgatcttcctgcccgtgctgctgagctacatcggccccagcgtgaacaaggccaagagctgcgccaccgaggagagatacaagggcaccgagagagagagactgctgaacttctgactcgaggacggggtgaactacgcctgaggatccgatctttttccctctgccaaaaattatggggacatcatgaagccccttgagcatctgacttctggctaataaaggaaatttattttcattgcaatagtgtgttggaattttttgtgtctctcactcggcctaggtagataagtagcatggcgggttaatcattaactacaaggaacccctagtgatggagttggccactccctctctgcgcgctcgctcgctcactgaggccgggcgaccaaaggtcgcccgacgcccgggctttgcccgggcggcctcagtgagcgagcgagcgcgcag

SEQ ID NO: 1808 - DNA, 4820 bp, Artificial Sequence
  source: /note="Description of Artificial Sequence: Synthetic polynucleotide"
ctgcgcgctcgctcgctcactgaggccgcccgggcaaagcccgggcgtcgggcgacctttggtcgcccggcctcagtgagcgagcgagcgcgcagagagggagtggccaactccatcactaggggttccttgtagttaatgattaacccgccatgctacttatctaccagggtaatggggatcctctagaactatagctaacgcgtccacgttctgcttcactctccccatctcccccccctccccacccccaattttgtatttatttattttttaattattttgtgcagcgatgggggcggggggggggggcgcgcgccaggcggggcggggcggggcgaggggcggggcggggcgaggcggagaggtgcggcggcagccaatcagagcggcgcgctccgaaagtttccttttatggcgaggcggcggcggcggcggccctataaaaagcgaagcgcgcggcgggcgggagcaagcttcgtttagtgaaccggtaagtatcaaggttacaagacaggtttaaggagaccaatagaaactgggcttgtcgagacagagaagactcttgcgtttctgataggcacctattggtcttactgacatccactttgcctttctctccacaggggattcgaaccggtgccgccaccatgaccgctcgcggcctggcccttggcctcctcctgctgctactgtgtccagcgcaggtgttttcacagtcctgtgtttggtatggagagtgtggaattgcatatggggacaagaggtacaattgcgaatattctggcccaccaaaaccattgccaaaggatggatatgacttagtgcaggaactctgtccaggattcttctttggcaatgtcagtctctgttgtgatgttcggcagcttcagacactaaaagacaacctgcagctgcctctacagtttctgtccagatgtccatcctgtttttataacctactgaacctgttttgtgagctgacatgtagccctcgacagagtcagtttttgaatgttacagctactgaagattatgttgatcctgttacaaaccagacgaaaacaaatgtgaaagagttacaatactacgtcggacagagttttgccaatgcaatgtacaatgcctgccgggatgtggaggccccctcaagtaatgacaaggccctgggactcctgtgtgggaaggacgctgacgcctgtaatgccaccaactggattgaatacatgttcaataaggacaatggacaggcaccttttaccatcactcctgtgttttcagattttccagtccatgggatggagcccatgaacaatgccaccaaaggctgtgacgagtctgtggatgaggtcacagcaccatgtagctgccaagactgctctattgtctgtggccccaagccccagcccccacctcctcctgctccctggacgatccttggcttggacgccatgtatgtcatcatgtggatcacctacatggcgtttttgcttgtgttttttggagcattttttgcagtgtggtgctacagaaaacggtattttgtctccgagtacactcccatcgatagcaatatagctttttctgttaatgcaagtgacaaaggagaggcgtcctgctgtgaccctgtcagcgcagcatttgagggctgcttgaggcggctgttcacacgctgggggtctttctgcgtccgaaaccctggctgtgtcattttcttctcgctggtcttcattactgcgtgttcgtcaggcctggtgtttgtccgggtcacaaccaatccagttgacctctggtcagcccccagcagccaggctcgcctggaaaaagagtactttgaccagcactttgggcctttcttccggacggagcagctcatcatccgggcccctctcactgacaaacacatttaccagccatacccttcgggagctgatgtaccctttggacctccgcttgacatacagatactgcaccaggttcttgacttacaaatagccatcgaaaacattactgcctcttatgacaatgagactgtgacacttcaagacatctgcttggcccctctttcaccgtataacacgaactgcaccattttgagtgtgttaaattacttccagaacagccattccgtgctggaccacaagaaaggggacgacttctttgtgtatgccgattaccacacgcactttctgtactgcgtacgggctcctgcctctctgaatgatacaagtttgctccatgacccttgtctgggtacgtttggtggaccagtgttcccgtggcttgtgttgggaggctatgatgatcaaaactacaataacgccactgcccttgtgattaccttccctgtcaataattactataatgatacagagaagctccagagggcccaggcctgggaaaaagagtttattaattttgtgaaaaactacaagaatcccaatctgaccatttccttcactgctgaacgaagtattgaagatgaactaaatcgtgaaagtgacagtgatgtcttcaccgttgtaattagctatgccatcatgtttctatatatttccctagccttggggcacatcaaaagctgtcgcaggcttctggtggattcgaaggtctcactaggcatcgcgggcatcttgatcgtgctgagctcggtggcttgctccttgggtgtcttcagctacattgggttgcccttgaccctcattgtgattgaagtcatcccgttcctggtgctggctgttggagtggacaacatcttcattctggtgcaggcctaccagagagatgaacgtcttcaaggggaaaccctggatcagcagctgggcagggtcctaggagaagtggctcccagtatgttcctgtcatccttttctgagactgtagcatttttcttaggagcattgtccgtgatgccagccgtgcacaccttctctctctttgcgggattggcagtcttcattgactttcttctgcagattacctgtttcgtgagtctcttggggttagacattaaacgtcaagagaaaaatcggctagacatcttttgctgtgtcagaggtgctgaagatggaacaagcgtccaggcctcagagagctgtttgtttcgcttcttcaaaaactcctattctccacttctgctaaaggactggatgagaccaattgtgatagcaatatttgtgggtgttctgtcattcagcatcgcagtcctgaacaaagtagatattggattggatcagtctctttcgatgccagatgactcctacatggtggattatttcaaatccatcagtcagtacctgcatgcgggtccgcctgtgtactttgtcctggaggaagggcacgactacacttcttccaaggggcagaacatggtgtgcggcggcatgggctgcaacaatgattccctggtgcagcagatatttaacgcggcgcagctggacaactatacccgaataggcttcgccccctcgtcctggatcgacgattatttcgactgggtgaagccacagtcgtcttgctgtcgagtggacaatatcactgaccagttctgcaatgcttcagtggttgaccctgcctgcgttcgctgcaggcctctgactccggaaggcaaacagaggcctcaggggggagacttcatgagattcctgcccatgttcctttcggataaccctaaccccaagtgtggcaaagggggacatgctgcctatagttctgcagttaacatcctccttggccatggcaccagggtcggagccacgtacttcatgacctaccacaccgtgctgcagacctctgctgactttattgacgctctgaagaaagcccgacttatagccagtaatgtcaccgaaaccatgggcattaacggcagtgcctaccgagtatttccttacagtgtgttttatgtcttctacgaacagtacctgaccatcattgacgacactatcttcaacctcggtgtgtccctgggcgcgatatttctggtgaccatggtcctcctgggctgtgagctctggtctgcagtcatcatgtgtgccaccatcgccatggtcttggtcaacatgtttggagttatgtggctctggggcatcagtctgaacgctgtatccttggtcaacctggtgatgagctgtggcatctccgtggagttctgcagccacataaccagagcgttcacggtgagcatgaaaggcagccgcgtggagcgcgcggaagaggcacttgcccacatgggcagctccgtgttcagtggaatcacacttacaaaatttggagggattgtggtgttggcttttgccaaatctcaaattttccagatattctacttcaggatgtatttggccatggtcttactgggagccactcacggattaatatttctccctgtcttactcagttacatagggccatcagtaaataaagccaaaagttgtgccactgaagagcgatacaaaggaacagagcgcgaacggcttctaaatttctagctcgaggacggggtgaactacgcctgaggatccgatctttttccctctgccaaaaattatggggacatcatgaagccccttgagcatctgacttctggctaataaaggaaatttattttcattgcaatagtgtgttggaattttttgtgtctctcactcggcctaggtagataagtagcatggcgggttaatcattaactacaaggaacccctagtgatggagttggccactccctctctgcgcgctcgctcgctcactgaggccgggcgaccaaaggtcgcccgacgcccgggctttgcccgggcggcctcagtgagcgagcgagcgcgcag

SEQ ID NO: 1809 - DNA, 4777 bp, Artificial Sequence
  source: /note="Description of Artificial Sequence: Synthetic polynucleotide"
ctgcgcgctcgctcgctcactgaggccgcccgggcaaagcccgggcgtcgggcgacctttggtcgcccggcctcagtgagcgagcgagcgcgcagagagggagtggccaactccatcactaggggttccttgtagttaatgattaacccgccatgctacttatctaccagggtaatggggatcctctagaactatagctaacgcgtgctattaccatggtgatgcggttttggcagtacatcaatgggcgtggatagcggtttgactcacggggatttccaagtctccaccccattgacgtcaatgggagtttgttttggcaccaaaatcaacgggactttccaaaatgtcgtaacaactccgccccattgacgcaaatgggcggtaggcgtgtacggtgggaggtctatataagcagagctccgggagcaagcttcgtttagtgaaccggtaagtatcaaggttacaagacaggtttaaggagaccaatagaaactgggcttgtcgagacagagaagactcttgcgtttctgataggcacctattggtcttactgacatccactttgcctttctctccacaggggattcgaaccggtgccgccaccatgaccgctcgcggcctggcccttggcctcctcctgctgctactgtgtccagcgcaggtgttttcacagtcctgtgtttggtatggagagtgtggaattgcatatggggacaagaggtacaattgcgaatattctggcccaccaaaaccattgccaaaggatggatatgacttagtgcaggaactctgtccaggattcttctttggcaatgtcagtctctgttgtgatgttcggcagcttcagacactaaaagacaacctgcagctgcctctacagtttctgtccagatgtccatcctgtttttataacctactgaacctgttttgtgagctgacatgtagccctcgacagagtcagtttttgaatgttacagctactgaagattatgttgatcctgttacaaaccagacgaaaacaaatgtgaaagagttacaatactacgtcggacagagttttgccaatgcaatgtacaatgcctgccgggatgtggaggccccctcaagtaatgacaaggccctgggactcctgtgtgggaaggacgctgacgcctgtaatgccaccaactggattgaatacatgttcaataaggacaatggacaggcaccttttaccatcactcctgtgttttcagattttccagtccatgggatggagcccatgaacaatgccaccaaaggctgtgacgagtctgtggatgaggtcacagcaccatgtagctgccaagactgctctattgtctgtggccccaagccccagcccccacctcctcctgctccctggacgatccttggcttggacgccatgtatgtcatcatgtggatcacctacatggcgtttttgcttgtgttttttggagcattttttgcagtgtggtgctacagaaaacggtattttgtctccgagtacactcccatcgatagcaatatagctttttctgttaatgcaagtgacaaaggagaggcgtcctgctgtgaccctgtcagcgcagcatttgagggctgcttgaggcggctgttcacacgctgggggtctttctgcgtccgaaaccctggctgtgtcattttcttctcgctggtcttcattactgcgtgttcgtcaggcctggtgtttgtccgggtcacaaccaatccagttgacctctggtcagcccccagcagccaggctcgcctggaaaaagagtactttgaccagcactttgggcctttcttccggacggagcagctcatcatccgggcccctctcactgacaaacacatttaccagccatacccttcgggagctgatgtaccctttggacctccgcttgacatacagatactgcaccaggttcttgacttacaaatagccatcgaaaacattactgcctcttatgacaatgagactgtgacacttcaagacatctgcttggcccctctttcaccgtataacacgaactgcaccattttgagtgtgttaaattacttccagaacagccattccgtgctggaccacaagaaaggggacgacttctttgtgtatgccgattaccacacgcactttctgtactgcgtacgggctcctgcctctctgaatgatacaagtttgctccatgacccttgtctgggtacgtttggtggaccagtgttcccgtggcttgtgttgggaggctatgatgatcaaaactacaataacgccactgcccttgtgattaccttccctgtcaataattactataatgatacagagaagctccagagggcccaggcctgggaaaaagagtttattaattttgtgaaaaactacaagaatcccaatctgaccatttccttcactgctgaacgaagtattgaagatgaactaaatcgtgaaagtgacagtgatgtcttcaccgttgtaattagctatgccatcatgtttctatatatttccctagccttggggcacatcaaaagctgtcgcaggcttctggtggattcgaaggtctcactaggcatcgcgggcatcttgatcgtgctgagctcggtggcttgctccttgggtgtcttcagctacattgggttgcccttgaccctcattgtgattgaagtcatcccgttcctggtgctggctgttggagtggacaacatcttcattctggtgcaggcctaccagagagatgaacgtcttcaaggggaaaccctggatcagcagctgggcagggtcctaggagaagtggctcccagtatgttcctgtcatccttttctgagactgtagcatttttcttaggagcattgtccgtgatgccagccgtgcacaccttctctctctttgcgggattggcagtcttcattgactttcttctgcagattacctgtttcgtgagtctcttggggttagacattaaacgtcaagagaaaaatcggctagacatcttttgctgtgtcagaggtgctgaagatggaacaagcgtccaggcctcagagagctgtttgtttcgcttcttcaaaaactcctattctccacttctgctaaaggactggatgagaccaattgtgatagcaatatttgtgggtgttctgtcattcagcatcgcagtcctgaacaaagtagatattggattggatcagtctctttcgatgccagatgactcctacatggtggattatttcaaatccatcagtcagtacctgcatgcgggtccgcctgtgtactttgtcctggaggaagggcacgactacacttcttccaaggggcagaacatggtgtgcggcggcatgggctgcaacaatgattccctggtgcagcagatatttaacgcggcgcagctggacaactatacccgaataggcttcgccccctcgtcctggatcgacgattatttcgactgggtgaagccacagtcgtcttgctgtcgagtggacaatatcactgaccagttctgcaatgcttcagtggttgaccctgcctgcgttcgctgcaggcctctgactccggaaggcaaacagaggcctcaggggggagacttcatgagattcctgcccatgttcctttcggataaccctaaccccaagtgtggcaaagggggacatgctgcctatagttctgcagttaacatcctccttggccatggcaccagggtcggagccacgtacttcatgacctaccacaccgtgctgcagacctctgctgactttattgacgctctgaagaaagcccgacttatagccagtaatgtcaccgaaaccatgggcattaacggcagtgcctaccgagtatttccttacagtgtgttttatgtcttctacgaacagtacctgaccatcattgacgacactatcttcaacctcggtgtgtccctgggcgcgatatttctggtgaccatggtcctcctgggctgtgagctctggtctgcagtcatcatgtgtgccaccatcgccatggtcttggtcaacatgtttggagttatgtggctctggggcatcagtctgaacgctgtatccttggtcaacctggtgatgagctgtggcatctccgtggagttctgcagccacataaccagagcgttcacggtgagcatgaaaggcagccgcgtggagcgcgcggaagaggcacttgcccacatgggcagctccgtgttcagtggaatcacacttacaaaatttggagggattgtggtgttggcttttgccaaatctcaaattttccagatattctacttcaggatgtatttggccatggtcttactgggagccactcacggattaatatttctccctgtcttactcagttacatagggccatcagtaaataaagccaaaagttgtgccactgaagagcgatacaaaggaacagagcgcgaacggcttctaaatttctagctcgaggacggggtgaactacgcctgaggatccgatctttttccctctgccaaaaattatggggacatcatgaagccccttgagcatctgacttctggctaataaaggaaatttattttcattgcaatagtgtgttggaattttttgtgtctctcactcggcctaggtagataagtagcatggcgggttaatcattaactacaaggaacccctagtgatggagttggccactccctctctgcgcgctcgctcgctcactgaggccgggcgaccaaaggtcgcccgacgcccgggctttgcccgggcggcctcagtgagcgagcgagcgcgcag

SEQ ID NO: 1810 - DNA, 4820 bp, Artificial Sequence
  source: /note="Description of Artificial Sequence: Synthetic polynucleotide"
ctgcgcgctcgctcgctcactgaggccgcccgggcaaagcccgggcgtcgggcgacctttggtcgcccggcctcagtgagcgagcgagcgcgcagagagggagtggccaactccatcactaggggttccttgtagttaatgattaacccgccatgctacttatctaccagggtaatggggatcctctagaactatagctaacgcgtccacgttctgcttcactctccccatctcccccccctccccacccccaattttgtatttatttattttttaattattttgtgcagcgatgggggcggggggggggggcgcgcgccaggcggggcggggcggggcgaggggcggggcggggcgaggcggagaggtgcggcggcagccaatcagagcggcgcgctccgaaagtttccttttatggcgaggcggcggcggcggcggccctataaaaagcgaagcgcgcggcgggcgggagcaagcttcgtttagtgaaccggtaagtatcaaggttacaagacaggtttaaggagaccaatagaaactgggcttgtcgagacagagaagactcttgcgtttctgataggcacctattggtcttactgacatccactttgcctttctctccacaggggattcgaaccggtgccgccaccatgaccgccaggggcctggccctgggactgctgctgctgctgctgtgcccagcccaggtgttctctcagagctgcgtgtggtatggcgagtgtggcatcgcctacggcgacaagcggtacaactgcgagtacagcggaccacctaagccactgccaaaggacggctacgatctggtgcaggagctgtgccctggcttctttttcggcaacgtgtccctgtgctgtgacgtgcggcagctgcagaccctgaaggataatctgcagctgcctctgcagtttctgtctagatgcccaagctgtttttataacctgctgaatctgttctgcgagctgacctgttccccaaggcagtctcagttcctgaacgtgaccgccacagaggactacgtggatcccgtgacaaaccagaccaagacaaatgtgaaggagctgcagtactatgtgggccagagcttcgccaacgccatgtataatgcatgcagggacgtggaggcacccagctccaatgataaggccctgggactgctgtgcggcaaggacgcagatgcctgtaacgccaccaattggatcgagtacatgtttaacaaggataatggccaggcccctttcaccatcacaccagtgttttccgacttccccgtgcacggcatggagcctatgaacaatgccaccaagggctgcgacgagtctgtggatgaggtgacagccccttgcagctgtcaggattgctccatcgtgtgcggacctaagccacagccaccacctccaccagcaccatggaccatcctgggactggacgccatgtatgtgatcatgtggatcacatacatggcctttctgctggtgtttttcggcgcctttttcgccgtgtggtgctatcggaagagatacttcgtgagcgagtacacccccatcgacagcaacatcgccttcagcgtgaatgcctccgacaagggcgaggcatcctgctgtgatcccgtgagcgccgccttcgagggatgcctgcggagactgtttacccggtggggctctttctgcgtgagaaacccaggctgcgtgatctttttcagcctggtgtttatcacagcctgttctagcggcctggtgttcgtgagggtgaccacaaatccagtggatctgtggagcgccccctcctctcaggcaaggctggagaaggagtactttgaccagcacttcggcccatttttcaggaccgagcagctgatcatcagggcaccactgacagataagcacatctaccagccatatcctagcggagcagacgtgcccttcggccctccactggatatccagatcctgcaccaggtgctggacctgcagatcgccatcgagaacatcaccgcctcctatgacaatgagaccgtgacactgcaggatatctgcctggcccctctgagcccatataacaccaattgtacaatcctgtccgtgctgaactactttcagaattcccactctgtgctggatcacaagaagggcgacgacttcttcgtgtacgccgactatcacacccacttcctgtactgcgtgcgggcccctgcctctctgaacgacaccagcctgctgcacgatccatgtctgggcacatttggcggccccgtgttcccttggctggtgctgggcggctatgacgatcagaactacaacaatgccaccgccctggtcatcaccttccctgtgaacaattactataatgataccgagaagctgcagagagcccaggcctgggagaaggagtttatcaacttcgtgaagaattacaagaacccaaatctgaccatcagcttcacagccgagcggtccatcgaggacgagctgaacagagagagcgactccgacgtgttcaccgtggtcatcagctatgccatcatgttcctgtacatcagcctggccctgggccacatcaagtcctgcaggcgcctgctggtggatagcaaggtgtccctgggcatcgccggcatcctgatcgtgctgagctccgtggcctgttccctgggcgtgttctcttatatcggcctgcctctgaccctgatcgtgatcgaagtgatcccatttctggtgctggccgtgggcgtggacaatatcttcatcctggtgcaggcataccagagggacgagcgcctgcagggagagacactggatcagcagctgggaagggtgctgggagaggtggcaccatccatgtttctgtctagcttctctgagaccgtggcctttttcctgggcgccctgtccgtgatgccagcagtgcacacattttctctgttcgccggcctggccgtgtttatcgacttcctgctgcagatcacctgcttcgtgagcctgctgggcctggacatcaagaggcaggagaagaaccgcctggatatcttctgctgcgtgcggggagcagaggacggcacatccgtgcaggcctctgagagctgtctgttccggtttttcaagaattcctattctccactgctgctgaaggactggatgagacccatcgtgatcgccatctttgtgggcgtgctgagcttctccatcgccgtgctgaacaaggtggacatcggcctggatcagtctctgagcatgcccgacgatagctatatggtggattactttaagtccatctctcagtatctgcacgcaggaccccccgtgtacttcgtgctggaggagggccacgactacacctcctctaagggccagaatatggtgtgcggcggcatgggctgtaacaatgattccctggtgcagcagatcttcaacgccgcccagctggacaattatacacggatcggctttgcccccagctcctggatcgacgattacttcgattgggtgaagcctcagtctagctgctgtagagtggacaacatcaccgatcagttttgcaatgcaagcgtggtggaccctgcatgcgtgaggtgtaggccactgacaccagagggcaagcagaggccacagggaggcgacttcatgcgcttcctgcctatgttcctgtccgacaacccaaatccaaagtgtggcaagggaggacacgcagcatactcctctgccgtgaacatcctgctgggacacggaaccagggtgggagccacatacttcatgacctaccacacagtgctgcagacctccgccgacttcatcgatgccctgaagaaggccaggctgatcgcctctaacgtgaccgagacaatgggcatcaatggctctgcctatcgcgtgtttccctacagcgtgttttacgtgttctatgagcagtacctgaccatcatcgacgatacaatctttaacctgggcgtgagcctgggcgccatcttcctggtgaccatggtgctgctgggatgcgagctgtggtccgccgtgatcatgtgcgccacaatcgccatggtgctggtgaatatgttcggcgtgatgtggctgtggggcatcagcctgaacgccgtgtccctggtgaacctggtcatgtcttgcggcatcagcgtggagttttgtagccacatcaccagagccttcacagtgtccatgaagggctctcgggtggagagagcagaggaggccctggcacacatgggcagctccgtgttttctggcatcaccctgacaaagttcggcggcatcgtggtgctggcctttgccaagagccagatcttccagatcttttatttccggatgtacctggcaatggtgctgctgggagcaacccacggcctgatctttctgcccgtgctgctgtcttatatcggccctagcgtgaacaaggccaagtcctgcgccaccgaggagagatacaagggcacagagcgggagagactgctgaatttctgactcgaggacggggtgaactacgcctgaggatccgatctttttccctctgccaaaaattatggggacatcatgaagccccttgagcatctgacttctggctaataaaggaaatttattttcattgcaatagtgtgttggaattttttgtgtctctcactcggcctaggtagataagtagcatggcgggttaatcattaactacaaggaacccctagtgatggagttggccactccctctctgcgcgctcgctcgctcactgaggccgggcgaccaaaggtcgcccgacgcccgggctttgcccgggcggcctcagtgagcgagcgagcgcgcag

SEQ ID NO: 1811 - DNA, 4820 bp, Artificial Sequence
  source: /note="Description of Artificial Sequence: Synthetic polynucleotide"
ctgcgcgctcgctcgctcactgaggccgcccgggcaaagcccgggcgtcgggcgacctttggtcgcccggcctcagtgagcgagcgagcgcgcagagagggagtggccaactccatcactaggggttccttgtagttaatgattaacccgccatgctacttatctaccagggtaatggggatcctctagaactatagctaacgcgtccacgttctgcttcactctccccatctcccccccctccccacccccaattttgtatttatttattttttaattattttgtgcagcgatgggggcggggggggggggcgcgcgccaggcggggcggggcggggcgaggggcggggcggggcgaggcggagaggtgcggcggcagccaatcagagcggcgcgctccgaaagtttccttttatggcgaggcggcggcggcggcggccctataaaaagcgaagcgcgcggcgggcgggagcaagcttcgtttagtgaaccggtaagtatcaaggttacaagacaggtttaaggagaccaatagaaactgggcttgtcgagacagagaagactcttgcgtttctgataggcacctattggtcttactgacatccactttgcctttctctccacaggggattcgaaccggtgccgccaccatgaccgccagaggcctggccctgggcctgctgctgctgctgctgtgccccgcccaggtgttcagccagagctgcgtgtggtacggcgagtgcggcatcgcctacggcgacaagagatacaactgcgagtacagcggcccccccaagcccctgcccaaggacggctacgacctggtgcaggagctgtgccccggcttcttcttcggcaacgtgagcctgtgctgcgacgtgagacagctgcagaccctgaaggacaacctgcagctgcccctgcagttcctgagcagatgccccagctgcttctacaacctgctgaacctgttctgcgagctgacctgcagccccagacagagccagttcctgaacgtgaccgccaccgaggactacgtggaccccgtgaccaaccagaccaagaccaacgtgaaggagctgcagtactacgtgggccagagcttcgccaacgccatgtacaacgcctgcagagacgtggaggcccccagcagcaacgacaaggccctgggcctgctgtgcggcaaggacgccgacgcctgcaacgccaccaactggatcgagtacatgttcaacaaggacaacggccaggcccccttcaccatcacccccgtgttcagcgacttccccgtgcacggcatggagcccatgaacaacgccaccaagggctgcgacgagagcgtggacgaggtgaccgccccctgcagctgccaggactgcagcatcgtgtgcggccccaagccccagcccccccccccccccgccccctggaccatcctgggcctggacgccatgtacgtgatcatgtggatcacctacatggccttcctgctggtgttcttcggcgccttcttcgccgtgtggtgctacagaaagagatacttcgtgagcgagtacacccccatcgacagcaacatcgccttcagcgtgaacgccagcgacaagggcgaggccagctgctgcgaccccgtgagcgccgccttcgagggctgcctgagaagactgttcaccagatggggcagcttctgcgtgagaaaccccggctgcgtgatcttcttcagcctggtgttcatcaccgcctgcagcagcggcctggtgttcgtgagagtgaccaccaaccccgtggacctgtggagcgcccccagcagccaggccagactggagaaggagtacttcgaccagcacttcggccccttcttcagaaccgagcagctgatcatcagagcccccctgaccgacaagcacatctaccagccctaccccagcggcgccgacgtgcccttcggcccccccctggacatccagatcctgcaccaggtgctggacctgcagatcgccatcgagaacatcaccgccagctacgacaacgagaccgtgaccctgcaggacatctgcctggcccccctgagcccctacaacaccaactgcaccatcctgagcgtgctgaactacttccagaacagccacagcgtgctggaccacaagaagggcgacgacttcttcgtgtacgccgactaccacacccacttcctgtactgcgtgagagcccccgccagcctgaacgacaccagcctgctgcacgacccctgcctgggcaccttcggcggccccgtgttcccctggctggtgctgggcggctacgacgaccagaactacaacaacgccaccgccctggtgatcaccttccccgtgaacaactactacaacgacaccgagaagctgcagagagcccaggcctgggagaaggagttcatcaacttcgtgaagaactacaagaaccccaacctgaccatcagcttcaccgccgagagaagcatcgaggacgagctgaacagagagagcgacagcgacgtgttcaccgtggtgatcagctacgccatcatgttcctgtacatcagcctggccctgggccacatcaagagctgcagaagactgctggtggacagcaaggtgagcctgggcatcgccggcatcctgatcgtgctgagcagcgtggcctgcagcctgggcgtgttcagctacatcggcctgcccctgaccctgatcgtgatcgaggtgatccccttcctggtgctggccgtgggcgtggacaacatcttcatcctggtgcaggcctaccagagagacgagagactgcagggcgagaccctggaccagcagctgggcagagtgctgggcgaggtggcccccagcatgttcctgagcagcttcagcgagaccgtggccttcttcctgggcgccctgagcgtgatgcccgccgtgcacaccttcagcctgttcgccggcctggccgtgttcatcgacttcctgctgcagatcacctgcttcgtgagcctgctgggcctggacatcaagagacaggagaagaacagactggacatcttctgctgcgtgagaggcgccgaggacggcaccagcgtgcaggccagcgagagctgcctgttcagattcttcaagaacagctacagccccctgctgctgaaggactggatgagacccatcgtgatcgccatcttcgtgggcgtgctgagcttcagcatcgccgtgctgaacaaggtggacatcggcctggaccagagcctgagcatgcccgacgacagctacatggtggactacttcaagagcatcagccagtacctgcacgccggcccccccgtgtacttcgtgctggaggagggccacgactacaccagcagcaagggccagaacatggtgtgcggcggcatgggctgcaacaacgacagcctggtgcagcagatcttcaacgccgcccagctggacaactacaccagaatcggcttcgcccccagcagctggatcgacgactacttcgactgggtgaagccccagagcagctgctgcagagtggacaacatcaccgaccagttctgcaacgccagcgtggtggaccccgcctgcgtgagatgcagacccctgacccccgagggcaagcagagaccccagggcggcgacttcatgagattcctgcccatgttcctgagcgacaaccccaaccccaagtgcggcaagggcggccacgccgcctacagcagcgccgtgaacatcctgctgggccacggcaccagagtgggcgccacctacttcatgacctaccacaccgtgctgcagaccagcgccgacttcatcgacgccctgaagaaggccagactgatcgccagcaacgtgaccgagaccatgggcatcaacggcagcgcctacagagtgttcccctacagcgtgttctacgtgttctacgagcagtacctgaccatcatcgacgacaccatcttcaacctgggcgtgagcctgggcgccatcttcctggtgaccatggtgctgctgggctgcgagctgtggagcgccgtgatcatgtgcgccaccatcgccatggtgctggtgaacatgttcggcgtgatgtggctgtggggcatcagcctgaacgccgtgagcctggtgaacctggtgatgagctgcggcatcagcgtggagttctgcagccacatcaccagagccttcaccgtgagcatgaagggcagcagagtggagagagccgaggaggccctggcccacatgggcagcagcgtgttcagcggcatcaccctgaccaagttcggcggcatcgtggtgctggccttcgccaagagccagatcttccagatcttctacttcagaatgtacctggccatggtgctgctgggcgccacccacggcctgatcttcctgcccgtgctgctgagctacatcggccccagcgtgaacaaggccaagagctgcgccaccgaggagagatacaagggcaccgagagagagagactgctgaacttctgactcgaggacggggtgaactacgcctgaggatccgatctttttccctctgccaaaaattatggggacatcatgaagccccttgagcatctgacttctggctaataaaggaaatttattttcattgcaatagtgtgttggaattttttgtgtctctcactcggcctaggtagataagtagcatggcgggttaatcattaactacaaggaacccctagtgatggagttggccactccctctctgcgcgctcgctcgctcactgaggccgggcgaccaaaggtcgcccgacgcccgggctttgcccgggcggcctcagtgagcgagcgagcgcgcag

SEQ ID NO: 1812 - DNA, 4777 bp, Artificial Sequence
  source: /note="Description of Artificial Sequence: Synthetic polynucleotide"
ctgcgcgctcgctcgctcactgaggccgcccgggcaaagcccgggcgtcgggcgacctttggtcgcccggcctcagtgagcgagcgagcgcgcagagagggagtggccaactccatcactaggggttccttgtagttaatgattaacccgccatgctacttatctaccagggtaatggggatcctctagaactatagctaacgcgtgctattaccatggtgatgcggttttggcagtacatcaatgggcgtggatagcggtttgactcacggggatttccaagtctccaccccattgacgtcaatgggagtttgttttggcaccaaaatcaacgggactttccaaaatgtcgtaacaactccgccccattgacgcaaatgggcggtaggcgtgtacggtgggaggtctatataagcagagctccgggagcaagcttcgtttagtgaaccggtaagtatcaaggttacaagacaggtttaaggagaccaatagaaactgggcttgtcgagacagagaagactcttgcgtttctgataggcacctattggtcttactgacatccactttgcctttctctccacaggggattcgaaccggtgccgccaccatgaccgccagaggcctggccctgggcctgctgctgctgctgctgtgccccgcccaggtgttcagccagagctgcgtgtggtacggcgagtgcggcatcgcctacggcgacaagagatacaactgcgagtacagcggcccccccaagcccctgcccaaggacggctacgacctggtgcaggagctgtgccccggcttcttcttcggcaacgtgagcctgtgctgcgacgtgagacagctgcagaccctgaaggacaacctgcagctgcccctgcagttcctgagcagatgccccagctgcttctacaacctgctgaacctgttctgcgagctgacctgcagccccagacagagccagttcctgaacgtgaccgccaccgaggactacgtggaccccgtgaccaaccagaccaagaccaacgtgaaggagctgcagtactacgtgggccagagcttcgccaacgccatgtacaacgcctgcagagacgtggaggcccccagcagcaacgacaaggccctgggcctgctgtgcggcaaggacgccgacgcctgcaacgccaccaactggatcgagtacatgttcaacaaggacaacggccaggcccccttcaccatcacccccgtgttcagcgacttccccgtgcacggcatggagcccatgaacaacgccaccaagggctgcgacgagagcgtggacgaggtgaccgccccctgcagctgccaggactgcagcatcgtgtgcggccccaagccccagcccccccccccccccgccccctggaccatcctgggcctggacgccatgtacgtgatcatgtggatcacctacatggccttcctgctggtgttcttcggcgccttcttcgccgtgtggtgctacagaaagagatacttcgtgagcgagtacacccccatcgacagcaacatcgccttcagcgtgaacgccagcgacaagggcgaggccagctgctgcgaccccgtgagcgccgccttcgagggctgcctgagaagactgttcaccagatggggcagcttctgcgtgagaaaccccggctgcgtgatcttcttcagcctggtgttcatcaccgcctgcagcagcggcctggtgttcgtgagagtgaccaccaaccccgtggacctgtggagcgcccccagcagccaggccagactggagaaggagtacttcgaccagcacttcggccccttcttcagaaccgagcagctgatcatcagagcccccctgaccgacaagcacatctaccagccctaccccagcggcgccgacgtgcccttcggcccccccctggacatccagatcctgcaccaggtgctggacctgcagatcgccatcgagaacatcaccgccagctacgacaacgagaccgtgaccctgcaggacatctgcctggcccccctgagcccctacaacaccaactgcaccatcctgagcgtgctgaactacttccagaacagccacagcgtgctggaccacaagaagggcgacgacttcttcgtgtacgccgactaccacacccacttcctgtactgcgtgagagcccccgccagcctgaacgacaccagcctgctgcacgacccctgcctgggcaccttcggcggccccgtgttcccctggctggtgctgggcggctacgacgaccagaactacaacaacgccaccgccctggtgatcaccttccccgtgaacaactactacaacgacaccgagaagctgcagagagcccaggcctgggagaaggagttcatcaacttcgtgaagaactacaagaaccccaacctgaccatcagcttcaccgccgagagaagcatcgaggacgagctgaacagagagagcgacagcgacgtgttcaccgtggtgatcagctacgccatcatgttcctgtacatcagcctggccctgggccacatcaagagctgcagaagactgctggtggacagcaaggtgagcctgggcatcgccggcatcctgatcgtgctgagcagcgtggcctgcagcctgggcgtgttcagctacatcggcctgcccctgaccctgatcgtgatcgaggtgatccccttcctggtgctggccgtgggcgtggacaacatcttcatcctggtgcaggcctaccagagagacgagagactgcagggcgagaccctggaccagcagctgggcagagtgctgggcgaggtggcccccagcatgttcctgagcagcttcagcgagaccgtggccttcttcctgggcgccctgagcgtgatgcccgccgtgcacaccttcagcctgttcgccggcctggccgtgttcatcgacttcctgctgcagatcacctgcttcgtgagcctgctgggcctggacatcaagagacaggagaagaacagactggacatcttctgctgcgtgagaggcgccgaggacggcaccagcgtgcaggccagcgagagctgcctgttcagattcttcaagaacagctacagccccctgctgctgaaggactggatgagacccatcgtgatcgccatcttcgtgggcgtgctgagcttcagcatcgccgtgctgaacaaggtggacatcggcctggaccagagcctgagcatgcccgacgacagctacatggtggactacttcaagagcatcagccagtacctgcacgccggcccccccgtgtacttcgtgctggaggagggccacgactacaccagcagcaagggccagaacatggtgtgcggcggcatgggctgcaacaacgacagcctggtgcagcagatcttcaacgccgcccagctggacaactacaccagaatcggcttcgcccccagcagctggatcgacgactacttcgactgggtgaagccccagagcagctgctgcagagtggacaacatcaccgaccagttctgcaacgccagcgtggtggaccccgcctgcgtgagatgcagacccctgacccccgagggcaagcagagaccccagggcggcgacttcatgagattcctgcccatgttcctgagcgacaaccccaaccccaagtgcggcaagggcggccacgccgcctacagcagcgccgtgaacatcctgctgggccacggcaccagagtgggcgccacctacttcatgacctaccacaccgtgctgcagaccagcgccgacttcatcgacgccctgaagaaggccagactgatcgccagcaacgtgaccgagaccatgggcatcaacggcagcgcctacagagtgttcccctacagcgtgttctacgtgttctacgagcagtacctgaccatcatcgacgacaccatcttcaacctgggcgtgagcctgggcgccatcttcctggtgaccatggtgctgctgggctgcgagctgtggagcgccgtgatcatgtgcgccaccatcgccatggtgctggtgaacatgttcggcgtgatgtggctgtggggcatcagcctgaacgccgtgagcctggtgaacctggtgatgagctgcggcatcagcgtggagttctgcagccacatcaccagagccttcaccgtgagcatgaagggcagcagagtggagagagccgaggaggccctggcccacatgggcagcagcgtgttcagcggcatcaccctgaccaagttcggcggcatcgtggtgctggccttcgccaagagccagatcttccagatcttctacttcagaatgtacctggccatggtgctgctgggcgccacccacggcctgatcttcctgcccgtgctgctgagctacatcggccccagcgtgaacaaggccaagagctgcgccaccgaggagagatacaagggcaccgagagagagagactgctgaacttctgactcgaggacggggtgaactacgcctgaggatccgatctttttccctctgccaaaaattatggggacatcatgaagccccttgagcatctgacttctggctaataaaggaaatttattttcattgcaatagtgtgttggaattttttgtgtctctcactcggcctaggtagataagtagcatggcgggttaatcattaactacaaggaacccctagtgatggagttggccactccctctctgcgcgctcgctcgctcactgaggccgggcgaccaaaggtcgcccgacgcccgggctttgcccgggcggcctcagtgagcgagcgagcgcgcag

SEQ ID NO: 1813 - DNA, 4684 bp, Artificial Sequence
  source: /note="Description of Artificial Sequence: Synthetic polynucleotide"
cctgcaggcagctgcgcgctcgctcgctcactgaggccgcccgggcaaagcccgggcgtcgggcgacctttggtcgcccggcctcagtgagcgagcgagcgcgcagagagggagtggccaactccatcactaggggttccttgtagttaatgattaacccgccatgctacttatctacgtagccatgcgtcgacataacgcgtatatctagaactatagctaacgcgtgcccgtcagtgggcagagcgcacatcgcccacagtccccgagaagttggggggaggggtcggcaattgaaccggtgcctagagaaggtggcgcggggtaaactgggaaagtgatgtcgtgtactggctccgcctttttcccgagggtgggggagaaccgtatataagtgcagtagtcgccgtgaacgttctttttcgcaacgggtttgccgccagaacacgcgtaagcgggagcaagcttcgtttcgaaccggtgccgccaccatgaccgctcgcggcctggcccttggcctcctcctgctgctactgtgtccagcgcaggtgttttcacagtcctgtgtttggtatggagagtgtggaattgcatatggggacaagaggtacaattgcgaatattctggcccaccaaaaccattgccaaaggatggatatgacttagtgcaggaactctgtccaggattcttctttggcaatgtcagtctctgttgtgatgttcggcagcttcagacactaaaagacaacctgcagctgcctctacagtttctgtccagatgtccatcctgtttttataacctactgaacctgttttgtgagctgacatgtagccctcgacagagtcagtttttgaatgttacagctactgaagattatgttgatcctgttacaaaccagacgaaaacaaatgtgaaagagttacaatactacgtcggacagagttttgccaatgcaatgtacaatgcctgccgggatgtggaggccccctcaagtaatgacaaggccctgggactcctgtgtgggaaggacgctgacgcctgtaatgccaccaactggattgaatacatgttcaataaggacaatggacaggcaccttttaccatcactcctgtgttttcagattttccagtccatgggatggagcccatgaacaatgccaccaaaggctgtgacgagtctgtggatgaggtcacagcaccatgtagctgccaagactgctctattgtctgtggccccaagccccagcccccacctcctcctgctccctggacgatccttggcttggacgccatgtatgtcatcatgtggatcacctacatggcgtttttgcttgtgttttttggagcattttttgcagtgtggtgctacagaaaacggtattttgtctccgagtacactcccatcgatagcaatatagctttttctgttaatgcaagtgacaaaggagaggcgtcctgctgtgaccctgtcagcgcagcatttgagggctgcttgaggcggctgttcacacgctgggggtctttctgcgtccgaaaccctggctgtgtcattttcttctcgctggtcttcattactgcgtgttcgtcaggcctggtgtttgtccgggtcacaaccaatccagttgacctctggtcagcccccagcagccaggctcgcctggaaaaagagtactttgaccagcactttgggcctttcttccggacggagcagctcatcatccgggcccctctcactgacaaacacatttaccagccatacccttcgggagctgatgtaccctttggacctccgcttgacatacagatactgcaccaggttcttgacttacaaatagccatcgaaaacattactgcctcttatgacaatgagactgtgacacttcaagacatctgcttggcccctctttcaccgtataacacgaactgcaccattttgagtgtgttaaattacttccagaacagccattccgtgctggaccacaagaaaggggacgacttctttgtgtatgccgattaccacacgcactttctgtactgcgtacgggctcctgcctctctgaatgatacaagtttgctccatgacccttgtctgggtacgtttggtggaccagtgttcccgtggcttgtgttgggaggctatgatgatcaaaactacaataacgccactgcccttgtgattaccttccctgtcaataattactataatgatacagagaagctccagagggcccaggcctgggaaaaagagtttattaattttgtgaaaaactacaagaatcccaatctgaccatttccttcactgctgaacgaagtattgaagatgaactaaatcgtgaaagtgacagtgatgtcttcaccgttgtaattagctatgccatcatgtttctatatatttccctagccttggggcacatcaaaagctgtcgcaggcttctggtggattcgaaggtctcactaggcatcgcgggcatcttgatcgtgctgagctcggtggcttgctccttgggtgtcttcagctacattgggttgcccttgaccctcattgtgattgaagtcatcccgttcctggtgctggctgttggagtggacaacatcttcattctggtgcaggcctaccagagagatgaacgtcttcaaggggaaaccctggatcagcagctgggcagggtcctaggagaagtggctcccagtatgttcctgtcatccttttctgagactgtagcatttttcttaggagcattgtccgtgatgccagccgtgcacaccttctctctctttgcgggattggcagtcttcattgactttcttctgcagattacctgtttcgtgagtctcttggggttagacattaaacgtcaagagaaaaatcggctagacatcttttgctgtgtcagaggtgctgaagatggaacaagcgtccaggcctcagagagctgtttgtttcgcttcttcaaaaactcctattctccacttctgctaaaggactggatgagaccaattgtgatagcaatatttgtgggtgttctgtcattcagcatcgcagtcctgaacaaagtagatattggattggatcagtctctttcgatgccagatgactcctacatggtggattatttcaaatccatcagtcagtacctgcatgcgggtccgcctgtgtactttgtcctggaggaagggcacgactacacttcttccaaggggcagaacatggtgtgcggcggcatgggctgcaacaatgattccctggtgcagcagatatttaacgcggcgcagctggacaactatacccgaataggcttcgccccctcgtcctggatcgacgattatttcgactgggtgaagccacagtcgtcttgctgtcgagtggacaatatcactgaccagttctgcaatgcttcagtggttgaccctgcctgcgttcgctgcaggcctctgactccggaaggcaaacagaggcctcaggggggagacttcatgagattcctgcccatgttcctttcggataaccctaaccccaagtgtggcaaagggggacatgctgcctatagttctgcagttaacatcctccttggccatggcaccagggtcggagccacgtacttcatgacctaccacaccgtgctgcagacctctgctgactttattgacgctctgaagaaagcccgacttatagccagtaatgtcaccgaaaccatgggcattaacggcagtgcctaccgagtatttccttacagtgtgttttatgtcttctacgaacagtacctgaccatcattgacgacactatcttcaacctcggtgtgtccctgggcgcgatatttctggtgaccatggtcctcctgggctgtgagctctggtctgcagtcatcatgtgtgccaccatcgccatggtcttggtcaacatgtttggagttatgtggctctggggcatcagtctgaacgctgtatccttggtcaacctggtgatgagctgtggcatctccgtggagttctgcagccacataaccagagcgttcacggtgagcatgaaaggcagccgcgtggagcgcgcggaagaggcacttgcccacatgggcagctccgtgttcagtggaatcacacttacaaaatttggagggattgtggtgttggcttttgccaaatctcaaattttccagatattctacttcaggatgtatttggccatggtcttactgggagccactcacggattaatatttctccctgtcttactcagttacatagggccatcagtaaataaagccaaaagttgtgccactgaagagcgatacaaaggaacagagcgcgaacggcttctaaatttctagctcgagatagcggccgcccccgagatctttttccctctgccaaaaattatggggacatcatgaagccccttgagcatctgacttctggctaataaaggaaatttattttcattgcaatagtgtgttggaattttttgtgtctctcactcgactagatttaaatagcatcgatgctacgtagataagtagcatggcgggttaatcattaactacagaggaacccctagtgatggagttggccactccctctctgcgcgctcgctcgctcactgaggccgggcgaccaaaggtcgcccgacgcccgggctttgcccgggcggcctcagtgagcgagcgagcgcgcagctgcctgcagg

SEQ ID NO: 1814 - DNA, 4801 bp, Artificial Sequence
  source: /note="Description of Artificial Sequence: Synthetic polynucleotide"
ctgcgcgctcgctcgctcactgaggccgcccgggcaaagcccgggcgtcgggcgacctttggtcgcccggcctcagtgagcgagcgagcgcgcagagagggagtggccaactccatcactaggggttccttgtagttaatgattaacccgccatgctacttatctaccagggtaatggggatcctctagaactatagctaacgcgtgcatgcgtgaggctccggtgcccgtcagtgggcagagcgcacatcgcccacagtccccgagaagttggggggaggggtcggcaattgaaccggtgcctagagaaggtggcgcggggtaaactgggaaagtgatgtcgtgtactggctccgcctttttcccgagggtgggggagaaccgtatataagtgcagtagtcgccgtgaacgttctttttcgcaacgggtttgccgccagaacacagcgggagcaagcttcgtttagtgaaccggtaagtatcaaggttacaagacaggtttaaggagaccaatagaaactgggcttgtcgagacagagaagactcttgcgtttctgataggcacctattggtcttactgacatccactttgcctttctctccacaggggattcgaaccggtgccgccaccatgaccgctcgcggcctggcccttggcctcctcctgctgctactgtgtccagcgcaggtgttttcacagtcctgtgtttggtatggagagtgtggaattgcatatggggacaagaggtacaattgcgaatattctggcccaccaaaaccattgccaaaggatggatatgacttagtgcaggaactctgtccaggattcttctttggcaatgtcagtctctgttgtgatgttcggcagcttcagacactaaaagacaacctgcagctgcctctacagtttctgtccagatgtccatcctgtttttataacctactgaacctgttttgtgagctgacatgtagccctcgacagagtcagtttttgaatgttacagctactgaagattatgttgatcctgttacaaaccagacgaaaacaaatgtgaaagagttacaatactacgtcggacagagttttgccaatgcaatgtacaatgcctgccgggatgtggaggccccctcaagtaatgacaaggccctgggactcctgtgtgggaaggacgctgacgcctgtaatgccaccaactggattgaatacatgttcaataaggacaatggacaggcaccttttaccatcactcctgtgttttcagattttccagtccatgggatggagcccatgaacaatgccaccaaaggctgtgacgagtctgtggatgaggtcacagcaccatgtagctgccaagactgctctattgtctgtggccccaagccccagcccccacctcctcctgctccctggacgatccttggcttggacgccatgtatgtcatcatgtggatcacctacatggcgtttttgcttgtgttttttggagcattttttgcagtgtggtgctacagaaaacggtattttgtctccgagtacactcccatcgatagcaatatagctttttctgttaatgcaagtgacaaaggagaggcgtcctgctgtgaccctgtcagcgcagcatttgagggctgcttgaggcggctgttcacacgctgggggtctttctgcgtccgaaaccctggctgtgtcattttcttctcgctggtcttcattactgcgtgttcgtcaggcctggtgtttgtccgggtcacaaccaatccagttgacctctggtcagcccccagcagccaggctcgcctggaaaaagagtactttgaccagcactttgggcctttcttccggacggagcagctcatcatccgggcccctctcactgacaaacacatttaccagccatacccttcgggagctgatgtaccctttggacctccgcttgacatacagatactgcaccaggttcttgacttacaaatagccatcgaaaacattactgcctcttatgacaatgagactgtgacacttcaagacatctgcttggcccctctttcaccgtataacacgaactgcaccattttgagtgtgttaaattacttccagaacagccattccgtgctggaccacaagaaaggggacgacttctttgtgtatgccgattaccacacgcactttctgtactgcgtacgggctcctgcctctctgaatgatacaagtttgctccatgacccttgtctgggtacgtttggtggaccagtgttcccgtggcttgtgttgggaggctatgatgatcaaaactacaataacgccactgcccttgtgattaccttccctgtcaataattactataatgatacagagaagctccagagggcccaggcctgggaaaaagagtttattaattttgtgaaaaactacaagaatcccaatctgaccatttccttcactgctgaacgaagtattgaagatgaactaaatcgtgaaagtgacagtgatgtcttcaccgttgtaattagctatgccatcatgtttctatatatttccctagccttggggcacatcaaaagctgtcgcaggcttctggtggattcgaaggtctcactaggcatcgcgggcatcttgatcgtgctgagctcggtggcttgctccttgggtgtcttcagctacattgggttgcccttgaccctcattgtgattgaagtcatcccgttcctggtgctggctgttggagtggacaacatcttcattctggtgcaggcctaccagagagatgaacgtcttcaaggggaaaccctggatcagcagctgggcagggtcctaggagaagtggctcccagtatgttcctgtcatccttttctgagactgtagcatttttcttaggagcattgtccgtgatgccagccgtgcacaccttctctctctttgcgggattggcagtcttcattgactttcttctgcagattacctgtttcgtgagtctcttggggttagacattaaacgtcaagagaaaaatcggctagacatcttttgctgtgtcagaggtgctgaagatggaacaagcgtccaggcctcagagagctgtttgtttcgcttcttcaaaaactcctattctccacttctgctaaaggactggatgagaccaattgtgatagcaatatttgtgggtgttctgtcattcagcatcgcagtcctgaacaaagtagatattggattggatcagtctctttcgatgccagatgactcctacatggtggattatttcaaatccatcagtcagtacctgcatgcgggtccgcctgtgtactttgtcctggaggaagggcacgactacacttcttccaaggggcagaacatggtgtgcggcggcatgggctgcaacaatgattccctggtgcagcagatatttaacgcggcgcagctggacaactatacccgaataggcttcgccccctcgtcctggatcgacgattatttcgactgggtgaagccacagtcgtcttgctgtcgagtggacaatatcactgaccagttctgcaatgcttcagtggttgaccctgcctgcgttcgctgcaggcctctgactccggaaggcaaacagaggcctcaggggggagacttcatgagattcctgcccatgttcctttcggataaccctaaccccaagtgtggcaaagggggacatgctgcctatagttctgcagttaacatcctccttggccatggcaccagggtcggagccacgtacttcatgacctaccacaccgtgctgcagacctctgctgactttattgacgctctgaagaaagcccgacttatagccagtaatgtcaccgaaaccatgggcattaacggcagtgcctaccgagtatttccttacagtgtgttttatgtcttctacgaacagtacctgaccatcattgacgacactatcttcaacctcggtgtgtccctgggcgcgatatttctggtgaccatggtcctcctgggctgtgagctctggtctgcagtcatcatgtgtgccaccatcgccatggtcttggtcaacatgtttggagttatgtggctctggggcatcagtctgaacgctgtatccttggtcaacctggtgatgagctgtggcatctccgtggagttctgcagccacataaccagagcgttcacggtgagcatgaaaggcagccgcgtggagcgcgcggaagaggcacttgcccacatgggcagctccgtgttcagtggaatcacacttacaaaatttggagggattgtggtgttggcttttgccaaatctcaaattttccagatattctacttcaggatgtatttggccatggtcttactgggagccactcacggattaatatttctccctgtcttactcagttacatagggccatcagtaaataaagccaaaagttgtgccactgaagagcgatacaaaggaacagagcgcgaacggcttctaaatttctagctcgaggacggggtgaactacgcctgaggatccgatctttttccctctgccaaaaattatggggacatcatgaagccccttgagcatctgacttctggctaataaaggaaatttattttcattgcaatagtgtgttggaattttttgtgtctctcactcggcctaggtagataagtagcatggcgggttaatcattaactacaaggaacccctagtgatggagttggccactccctctctgcgcgctcgctcgctcactgaggccgggcgaccaaaggtcgcccgacgcccgggctttgcccgggcggcctcagtgagcgagcgagcgcgcag

SEQ ID NO: 1815 - DNA, 4653 bp, Artificial Sequence
  source: /note="Description of Artificial Sequence: Synthetic polynucleotide"
ctgcgcgctcgctcgctcactgaggccgcccgggcaaagcccgggcgtcgggcgacctttggtcgcccggcctcagtgagcgagcgagcgcgcagagagggagtggccaactccatcactaggggttccttgtagttaatgattaacccgccatgctacttatctaccagggtaatggggatcctctagaactatagctaacgcgtgcatgcgtgaggctccggtgcccgtcagtgggcagagcgcacatcgcccacagtccccgagaagttggggggaggggtcggcaattgaaccggtgcctagagaaggtggcgcggggtaaactgggaaagtgatgtcgtgtactggctccgcctttttcccgagggtgggggagaaccgtatataagtgcagtagtcgccgtgaacgttctttttcgcaacgggtttgccgccagaacacagcgggagcaagcttcgtttcgaaccggtgccgccaccatgaccgccaggggcctggccctgggactgctgctgctgctgctgtgcccagcccaggtgttctctcagagctgcgtgtggtatggcgagtgtggcatcgcctacggcgacaagcggtacaactgcgagtacagcggaccacctaagccactgccaaaggacggctacgatctggtgcaggagctgtgccctggcttctttttcggcaacgtgtccctgtgctgtgacgtgcggcagctgcagaccctgaaggataatctgcagctgcctctgcagtttctgtctagatgcccaagctgtttttataacctgctgaatctgttctgcgagctgacctgttccccaaggcagtctcagttcctgaacgtgaccgccacagaggactacgtggatcccgtgacaaaccagaccaagacaaatgtgaaggagctgcagtactatgtgggccagagcttcgccaacgccatgtataatgcatgcagggacgtggaggcacccagctccaatgataaggccctgggactgctgtgcggcaaggacgcagatgcctgtaacgccaccaattggatcgagtacatgtttaacaaggataatggccaggcccctttcaccatcacaccagtgttttccgacttccccgtgcacggcatggagcctatgaacaatgccaccaagggctgcgacgagtctgtggatgaggtgacagccccttgcagctgtcaggattgctccatcgtgtgcggacctaagccacagccaccacctccaccagcaccatggaccatcctgggactggacgccatgtatgtgatcatgtggatcacatacatggcctttctgctggtgtttttcggcgcctttttcgccgtgtggtgctatcggaagagatacttcgtgagcgagtacacccccatcgacagcaacatcgccttcagcgtgaatgcctccgacaagggcgaggcatcctgctgtgatcccgtgagcgccgccttcgagggatgcctgcggagactgtttacccggtggggctctttctgcgtgagaaacccaggctgcgtgatctttttcagcctggtgtttatcacagcctgttctagcggcctggtgttcgtgagggtgaccacaaatccagtggatctgtggagcgccccctcctctcaggcaaggctggagaaggagtactttgaccagcacttcggcccatttttcaggaccgagcagctgatcatcagggcaccactgacagataagcacatctaccagccatatcctagcggagcagacgtgcccttcggccctccactggatatccagatcctgcaccaggtgctggacctgcagatcgccatcgagaacatcaccgcctcctatgacaatgagaccgtgacactgcaggatatctgcctggcccctctgagcccatataacaccaattgtacaatcctgtccgtgctgaactactttcagaattcccactctgtgctggatcacaagaagggcgacgacttcttcgtgtacgccgactatcacacccacttcctgtactgcgtgcgggcccctgcctctctgaacgacaccagcctgctgcacgatccatgtctgggcacatttggcggccccgtgttcccttggctggtgctgggcggctatgacgatcagaactacaacaatgccaccgccctggtcatcaccttccctgtgaacaattactataatgataccgagaagctgcagagagcccaggcctgggagaaggagtttatcaacttcgtgaagaattacaagaacccaaatctgaccatcagcttcacagccgagcggtccatcgaggacgagctgaacagagagagcgactccgacgtgttcaccgtggtcatcagctatgccatcatgttcctgtacatcagcctggccctgggccacatcaagtcctgcaggcgcctgctggtggatagcaaggtgtccctgggcatcgccggcatcctgatcgtgctgagctccgtggcctgttccctgggcgtgttctcttatatcggcctgcctctgaccctgatcgtgatcgaagtgatcccatttctggtgctggccgtgggcgtggacaatatcttcatcctggtgcaggcataccagagggacgagcgcctgcagggagagacactggatcagcagctgggaagggtgctgggagaggtggcaccatccatgtttctgtctagcttctctgagaccgtggcctttttcctgggcgccctgtccgtgatgccagcagtgcacacattttctctgttcgccggcctggccgtgtttatcgacttcctgctgcagatcacctgcttcgtgagcctgctgggcctggacatcaagaggcaggagaagaaccgcctggatatcttctgctgcgtgcggggagcagaggacggcacatccgtgcaggcctctgagagctgtctgttccggtttttcaagaattcctattctccactgctgctgaaggactggatgagacccatcgtgatcgccatctttgtgggcgtgctgagcttctccatcgccgtgctgaacaaggtggacatcggcctggatcagtctctgagcatgcccgacgatagctatatggtggattactttaagtccatctctcagtatctgcacgcaggaccccccgtgtacttcgtgctggaggagggccacgactacacctcctctaagggccagaatatggtgtgcggcggcatgggctgtaacaatgattccctggtgcagcagatcttcaacgccgcccagctggacaattatacacggatcggctttgcccccagctcctggatcgacgattacttcgattgggtgaagcctcagtctagctgctgtagagtggacaacatcaccgatcagttttgcaatgcaagcgtggtggaccctgcatgcgtgaggtgtaggccactgacaccagagggcaagcagaggccacagggaggcgacttcatgcgcttcctgcctatgttcctgtccgacaacccaaatccaaagtgtggcaagggaggacacgcagcatactcctctgccgtgaacatcctgctgggacacggaaccagggtgggagccacatacttcatgacctaccacacagtgctgcagacctccgccgacttcatcgatgccctgaagaaggccaggctgatcgcctctaacgtgaccgagacaatgggcatcaatggctctgcctatcgcgtgtttccctacagcgtgttttacgtgttctatgagcagtacctgaccatcatcgacgatacaatctttaacctgggcgtgagcctgggcgccatcttcctggtgaccatggtgctgctgggatgcgagctgtggtccgccgtgatcatgtgcgccacaatcgccatggtgctggtgaatatgttcggcgtgatgtggctgtggggcatcagcctgaacgccgtgtccctggtgaacctggtcatgtcttgcggcatcagcgtggagttttgtagccacatcaccagagccttcacagtgtccatgaagggctctcgggtggagagagcagaggaggccctggcacacatgggcagctccgtgttttctggcatcaccctgacaaagttcggcggcatcgtggtgctggcctttgccaagagccagatcttccagatcttttatttccggatgtacctggcaatggtgctgctgggagcaacccacggcctgatctttctgcccgtgctgctgtcttatatcggccctagcgtgaacaaggccaagtcctgcgccaccgaggagagatacaagggcacagagcgggagagactgctgaatttctgactcgaggacggggtgaactacgcctgaggatccgatctttttccctctgccaaaaattatggggacatcatgaagccccttgagcatctgacttctggctaataaaggaaatttattttcattgcaatagtgtgttggaattttttgtgtctctcactcggcctaggtagataagtagcatggcgggttaatcattaactacaaggaacccctagtgatggagttggccactccctctctgcgcgctcgctcgctcactgaggccgggcgaccaaaggtcgcccgacgcccgggctttgcccgggcggcctcagtgagcgagcgagcgcgcag

SEQ ID NO: 1816 - DNA, 4801 bp, Artificial Sequence
  source: /note="Description of Artificial Sequence: Synthetic polynucleotide"
ctgcgcgctcgctcgctcactgaggccgcccgggcaaagcccgggcgtcgggcgacctttggtcgcccggcctcagtgagcgagcgagcgcgcagagagggagtggccaactccatcactaggggttccttgtagttaatgattaacccgccatgctacttatctaccagggtaatggggatcctctagaactatagctaacgcgtgcatgcgtgaggctccggtgcccgtcagtgggcagagcgcacatcgcccacagtccccgagaagttggggggaggggtcggcaattgaaccggtgcctagagaaggtggcgcggggtaaactgggaaagtgatgtcgtgtactggctccgcctttttcccgagggtgggggagaaccgtatataagtgcagtagtcgccgtgaacgttctttttcgcaacgggtttgccgccagaacacagcgggagcaagcttcgtttagtgaaccggtaagtatcaaggttacaagacaggtttaaggagaccaatagaaactgggcttgtcgagacagagaagactcttgcgtttctgataggcacctattggtcttactgacatccactttgcctttctctccacaggggattcgaaccggtgccgccaccatgaccgccaggggcctggccctgggactgctgctgctgctgctgtgcccagcccaggtgttctctcagagctgcgtgtggtatggcgagtgtggcatcgcctacggcgacaagcggtacaactgcgagtacagcggaccacctaagccactgccaaaggacggctacgatctggtgcaggagctgtgccctggcttctttttcggcaacgtgtccctgtgctgtgacgtgcggcagctgcagaccctgaaggataatctgcagctgcctctgcagtttctgtctagatgcccaagctgtttttataacctgctgaatctgttctgcgagctgacctgttccccaaggcagtctcagttcctgaacgtgaccgccacagaggactacgtggatcccgtgacaaaccagaccaagacaaatgtgaaggagctgcagtactatgtgggccagagcttcgccaacgccatgtataatgcatgcagggacgtggaggcacccagctccaatgataaggccctgggactgctgtgcggcaaggacgcagatgcctgtaacgccaccaattggatcgagtacatgtttaacaaggataatggccaggcccctttcaccatcacaccagtgttttccgacttccccgtgcacggcatggagcctatgaacaatgccaccaagggctgcgacgagtctgtggatgaggtgacagccccttgcagctgtcaggattgctccatcgtgtgcggacctaagccacagccaccacctccaccagcaccatggaccatcctgggactggacgccatgtatgtgatcatgtggatcacatacatggcctttctgctggtgtttttcggcgcctttttcgccgtgtggtgctatcggaagagatacttcgtgagcgagtacacccccatcgacagcaacatcgccttcagcgtgaatgcctccgacaagggcgaggcatcctgctgtgatcccgtgagcgccgccttcgagggatgcctgcggagactgtttacccggtggggctctttctgcgtgagaaacccaggctgcgtgatctttttcagcctggtgtttatcacagcctgttctagcggcctggtgttcgtgagggtgaccacaaatccagtggatctgtggagcgccccctcctctcaggcaaggctggagaaggagtactttgaccagcacttcggcccatttttcaggaccgagcagctgatcatcagggcaccactgacagataagcacatctaccagccatatcctagcggagcagacgtgcccttcggccctccactggatatccagatcctgcaccaggtgctggacctgcagatcgccatcgagaacatcaccgcctcctatgacaatgagaccgtgacactgcaggatatctgcctggcccctctgagcccatataacaccaattgtacaatcctgtccgtgctgaactactttcagaattcccactctgtgctggatcacaagaagggcgacgacttcttcgtgtacgccgactatcacacccacttcctgtactgcgtgcgggcccctgcctctctgaacgacaccagcctgctgcacgatccatgtctgggcacatttggcggccccgtgttcccttggctggtgctgggcggctatgacgatcagaactacaacaatgccaccgccctggtcatcaccttccctgtgaacaattactataatgataccgagaagctgcagagagcccaggcctgggagaaggagtttatcaacttcgtgaagaattacaagaacccaaatctgaccatcagcttcacagccgagcggtccatcgaggacgagctgaacagagagagcgactccgacgtgttcaccgtggtcatcagctatgccatcatgttcctgtacatcagcctggccctgggccacatcaagtcctgcaggcgcctgctggtggatagcaaggtgtccctgggcatcgccggcatcctgatcgtgctgagctccgtggcctgttccctgggcgtgttctcttatatcggcctgcctctgaccctgatcgtgatcgaagtgatcccatttctggtgctggccgtgggcgtggacaatatcttcatcctggtgcaggcataccagagggacgagcgcctgcagggagagacactggatcagcagctgggaagggtgctgggagaggtggcaccatccatgtttctgtctagcttctctgagaccgtggcctttttcctgggcgccctgtccgtgatgccagcagtgcacacattttctctgttcgccggcctggccgtgtttatcgacttcctgctgcagatcacctgcttcgtgagcctgctgggcctggacatcaagaggcaggagaagaaccgcctggatatcttctgctgcgtgcggggagcagaggacggcacatccgtgcaggcctctgagagctgtctgttccggtttttcaagaattcctattctccactgctgctgaaggactggatgagacccatcgtgatcgccatctttgtgggcgtgctgagcttctccatcgccgtgctgaacaaggtggacatcggcctggatcagtctctgagcatgcccgacgatagctatatggtggattactttaagtccatctctcagtatctgcacgcaggaccccccgtgtacttcgtgctggaggagggccacgactacacctcctctaagggccagaatatggtgtgcggcggcatgggctgtaacaatgattccctggtgcagcagatcttcaacgccgcccagctggacaattatacacggatcggctttgcccccagctcctggatcgacgattacttcgattgggtgaagcctcagtctagctgctgtagagtggacaacatcaccgatcagttttgcaatgcaagcgtggtggaccctgcatgcgtgaggtgtaggccactgacaccagagggcaagcagaggccacagggaggcgacttcatgcgcttcctgcctatgttcctgtccgacaacccaaatccaaagtgtggcaagggaggacacgcagcatactcctctgccgtgaacatcctgctgggacacggaaccagggtgggagccacatacttcatgacctaccacacagtgctgcagacctccgccgacttcatcgatgccctgaagaaggccaggctgatcgcctctaacgtgaccgagacaatgggcatcaatggctctgcctatcgcgtgtttccctacagcgtgttttacgtgttctatgagcagtacctgaccatcatcgacgatacaatctttaacctgggcgtgagcctgggcgccatcttcctggtgaccatggtgctgctgggatgcgagctgtggtccgccgtgatcatgtgcgccacaatcgccatggtgctggtgaatatgttcggcgtgatgtggctgtggggcatcagcctgaacgccgtgtccctggtgaacctggtcatgtcttgcggcatcagcgtggagttttgtagccacatcaccagagccttcacagtgtccatgaagggctctcgggtggagagagcagaggaggccctggcacacatgggcagctccgtgttttctggcatcaccctgacaaagttcggcggcatcgtggtgctggcctttgccaagagccagatcttccagatcttttatttccggatgtacctggcaatggtgctgctgggagcaacccacggcctgatctttctgcccgtgctgctgtcttatatcggccctagcgtgaacaaggccaagtcctgcgccaccgaggagagatacaagggcacagagcgggagagactgctgaatttctgactcgaggacggggtgaactacgcctgaggatccgatctttttccctctgccaaaaattatggggacatcatgaagccccttgagcatctgacttctggctaataaaggaaatttattttcattgcaatagtgtgttggaattttttgtgtctctcactcggcctaggtagataagtagcatggcgggttaatcattaactacaaggaacccctagtgatggagttggccactccctctctgcgcgctcgctcgctcactgaggccgggcgaccaaaggtcgcccgacgcccgggctttgcccgggcggcctcagtgagcgagcgagcgcgcag

SEQ ID NO: 1817 - DNA, 4648 bp, Artificial Sequence
  source: /note="Description of Artificial Sequence: Synthetic polynucleotide"
ctgcgcgctcgctcgctcactgaggccgcccgggcaaagcccgggcgtcgggcgacctttggtcgcccggcctcagtgagcgagcgagcgcgcagagagggagtggccaactccatcactaggggttccttgtagttaatgattaacccgccatgctacttatctaccagggtaatggggatcctctagaactatagctaacgcgtcgtgaggctccggtgcccgtcagtgggcagagcgcacatcgcccacagtccccgagaagttggggggaggggtcggcaattgaaccggtgcctagagaaggtggcgcggggtaaactgggaaagtgatgtcgtgtactggctccgcctttttcccgagggtgggggagaaccgtatataagtgcagtagtcgccgtgaacgttctttttcgcaacgggtttgccgccagaacacagcgggagcaagcttcgtttcgaaccggtgccgccaccatgaccgctcgcggcctggcccttggcctcctcctgctgctactgtgtccagcgcaggtgttttcacagtcctgtgtttggtatggagagtgtggaattgcatatggggacaagaggtacaattgcgaatattctggcccaccaaaaccattgccaaaggatggatatgacttagtgcaggaactctgtccaggattcttctttggcaatgtcagtctctgttgtgatgttcggcagcttcagacactaaaagacaacctgcagctgcctctacagtttctgtccagatgtccatcctgtttttataacctactgaacctgttttgtgagctgacatgtagccctcgacagagtcagtttttgaatgttacagctactgaagattatgttgatcctgttacaaaccagacgaaaacaaatgtgaaagagttacaatactacgtcggacagagttttgccaatgcaatgtacaatgcctgccgggatgtggaggccccctcaagtaatgacaaggccctgggactcctgtgtgggaaggacgctgacgcctgtaatgccaccaactggattgaatacatgttcaataaggacaatggacaggcaccttttaccatcactcctgtgttttcagattttccagtccatgggatggagcccatgaacaatgccaccaaaggctgtgacgagtctgtggatgaggtcacagcaccatgtagctgccaagactgctctattgtctgtggccccaagccccagcccccacctcctcctgctccctggacgatccttggcttggacgccatgtatgtcatcatgtggatcacctacatggcgtttttgcttgtgttttttggagcattttttgcagtgtggtgctacagaaaacggtattttgtctccgagtacactcccatcgatagcaatatagctttttctgttaatgcaagtgacaaaggagaggcgtcctgctgtgaccctgtcagcgcagcatttgagggctgcttgaggcggctgttcacacgctgggggtctttctgcgtccgaaaccctggctgtgtcattttcttctcgctggtcttcattactgcgtgttcgtcaggcctggtgtttgtccgggtcacaaccaatccagttgacctctggtcagcccccagcagccaggctcgcctggaaaaagagtactttgaccagcactttgggcctttcttccggacggagcagctcatcatccgggcccctctcactgacaaacacatttaccagccatacccttcgggagctgatgtaccctttggacctccgcttgacatacagatactgcaccaggttcttgacttacaaatagccatcgaaaacattactgcctcttatgacaatgagactgtgacacttcaagacatctgcttggcccctctttcaccgtataacacgaactgcaccattttgagtgtgttaaattacttccagaacagccattccgtgctggaccacaagaaaggggacgacttctttgtgtatgccgattaccacacgcactttctgtactgcgtacgggctcctgcctctctgaatgatacaagtttgctccatgacccttgtctgggtacgtttggtggaccagtgttcccgtggcttgtgttgggaggctatgatgatcaaaactacaataacgccactgcccttgtgattaccttccctgtcaataattactataatgatacagagaagctccagagggcccaggcctgggaaaaagagtttattaattttgtgaaaaactacaagaatcccaatctgaccatttccttcactgctgaacgaagtattgaagatgaactaaatcgtgaaagtgacagtgatgtcttcaccgttgtaattagctatgccatcatgtttctatatatttccctagccttggggcacatcaaaagctgtcgcaggcttctggtggattcgaaggtctcactaggcatcgcgggcatcttgatcgtgctgagctcggtggcttgctccttgggtgtcttcagctacattgggttgcccttgaccctcattgtgattgaagtcatcccgttcctggtgctggctgttggagtggacaacatcttcattctggtgcaggcctaccagagagatgaacgtcttcaaggggaaaccctggatcagcagctgggcagggtcctaggagaagtggctcccagtatgttcctgtcatccttttctgagactgtagcatttttcttaggagcattgtccgtgatgccagccgtgcacaccttctctctctttgcgggattggcagtcttcattgactttcttctgcagattacctgtttcgtgagtctcttggggttagacattaaacgtcaagagaaaaatcggctagacatcttttgctgtgtcagaggtgctgaagatggaacaagcgtccaggcctcagagagctgtttgtttcgcttcttcaaaaactcctattctccacttctgctaaaggactggatgagaccaattgtgatagcaatatttgtgggtgttctgtcattcagcatcgcagtcctgaacaaagtagatattggattggatcagtctctttcgatgccagatgactcctacatggtggattatttcaaatccatcagtcagtacctgcatgcgggtccgcctgtgtactttgtcctggaggaagggcacgactacacttcttccaaggggcagaacatggtgtgcggcggcatgggctgcaacaatgattccctggtgcagcagatatttaacgcggcgcagctggacaactatacccgaataggcttcgccccctcgtcctggatcgacgattatttcgactgggtgaagccacagtcgtcttgctgtcgagtggacaatatcactgaccagttctgcaatgcttcagtggttgaccctgcctgcgttcgctgcaggcctctgactccggaaggcaaacagaggcctcaggggggagacttcatgagattcctgcccatgttcctttcggataaccctaaccccaagtgtggcaaagggggacatgctgcctatagttctgcagttaacatcctccttggccatggcaccagggtcggagccacgtacttcatgacctaccacaccgtgctgcagacctctgctgactttattgacgctctgaagaaagcccgacttatagccagtaatgtcaccgaaaccatgggcattaacggcagtgcctaccgagtatttccttacagtgtgttttatgtcttctacgaacagtacctgaccatcattgacgacactatcttcaacctcggtgtgtccctgggcgcgatatttctggtgaccatggtcctcctgggctgtgagctctggtctgcagtcatcatgtgtgccaccatcgccatggtcttggtcaacatgtttggagttatgtggctctggggcatcagtctgaacgctgtatccttggtcaacctggtgatgagctgtggcatctccgtggagttctgcagccacataaccagagcgttcacggtgagcatgaaaggcagccgcgtggagcgcgcggaagaggcacttgcccacatgggcagctccgtgttcagtggaatcacacttacaaaatttggagggattgtggtgttggcttttgccaaatctcaaattttccagatattctacttcaggatgtatttggccatggtcttactgggagccactcacggattaatatttctccctgtcttactcagttacatagggccatcagtaaataaagccaaaagttgtgccactgaagagcgatacaaaggaacagagcgcgaacggcttctaaatttctagctcgaggacggggtgaactacgcctgaggatccgatctttttccctctgccaaaaattatggggacatcatgaagccccttgagcatctgacttctggctaataaaggaaatttattttcattgcaatagtgtgttggaattttttgtgtctctcactcggcctaggtagataagtagcatggcgggttaatcattaactacaaggaacccctagtgatggagttggccactccctctctgcgcgctcgctcgctcactgaggccgggcgaccaaaggtcgcccgacgcccgggctttgcccgggcggcctcagtgagcgagcgagcgcgcag

SEQ ID NO: 1818 - DNA, 4653 bp, Artificial Sequence
  source: /note="Description of Artificial Sequence: Synthetic polynucleotide"
ctgcgcgctcgctcgctcactgaggccgcccgggcaaagcccgggcgtcgggcgacctttggtcgcccggcctcagtgagcgagcgagcgcgcagagagggagtggccaactccatcactaggggttccttgtagttaatgattaacccgccatgctacttatctaccagggtaatggggatcctctagaactatagctaacgcgtgcatgcgtgaggctccggtgcccgtcagtgggcagagcgcacatcgcccacagtccccgagaagttggggggaggggtcggcaattgaaccggtgcctagagaaggtggcgcggggtaaactgggaaagtgatgtcgtgtactggctccgcctttttcccgagggtgggggagaaccgtatataagtgcagtagtcgccgtgaacgttctttttcgcaacgggtttgccgccagaacacagcgggagcaagcttcgtttcgaaccggtgccgccaccatgaccgctcgcggcctggcccttggcctcctcctgctgctactgtgtccagcgcaggtgttttcacagtcctgtgtttggtatggagagtgtggaattgcatatggggacaagaggtacaattgcgaatattctggcccaccaaaaccattgccaaaggatggatatgacttagtgcaggaactctgtccaggattcttctttggcaatgtcagtctctgttgtgatgttcggcagcttcagacactaaaagacaacctgcagctgcctctacagtttctgtccagatgtccatcctgtttttataacctactgaacctgttttgtgagctgacatgtagccctcgacagagtcagtttttgaatgttacagctactgaagattatgttgatcctgttacaaaccagacgaaaacaaatgtgaaagagttacaatactacgtcggacagagttttgccaatgcaatgtacaatgcctgccgggatgtggaggccccctcaagtaatgacaaggccctgggactcctgtgtgggaaggacgctgacgcctgtaatgccaccaactggattgaatacatgttcaataaggacaatggacaggcaccttttaccatcactcctgtgttttcagattttccagtccatgggatggagcccatgaacaatgccaccaaaggctgtgacgagtctgtggatgaggtcacagcaccatgtagctgccaagactgctctattgtctgtggccccaagccccagcccccacctcctcctgctccctggacgatccttggcttggacgccatgtatgtcatcatgtggatcacctacatggcgtttttgcttgtgttttttggagcattttttgcagtgtggtgctacagaaaacggtattttgtctccgagtacactcccatcgatagcaatatagctttttctgttaatgcaagtgacaaaggagaggcgtcctgctgtgaccctgtcagcgcagcatttgagggctgcttgaggcggctgttcacacgctgggggtctttctgcgtccgaaaccctggctgtgtcattttcttctcgctggtcttcattactgcgtgttcgtcaggcctggtgtttgtccgggtcacaaccaatccagttgacctctggtcagcccccagcagccaggctcgcctggaaaaagagtactttgaccagcactttgggcctttcttccggacggagcagctcatcatccgggcccctctcactgacaaacacatttaccagccatacccttcgggagctgatgtaccctttggacctccgcttgacatacagatactgcaccaggttcttgacttacaaatagccatcgaaaacattactgcctcttatgacaatgagactgtgacacttcaagacatctgcttggcccctctttcaccgtataacacgaactgcaccattttgagtgtgttaaattacttccagaacagccattccgtgctggaccacaagaaaggggacgacttctttgtgtatgccgattaccacacgcactttctgtactgcgtacgggctcctgcctctctgaatgatacaagtttgctccatgacccttgtctgggtacgtttggtggaccagtgttcccgtggcttgtgttgggaggctatgatgatcaaaactacaataacgccactgcccttgtgattaccttccctgtcaataattactataatgatacagagaagctccagagggcccaggcctgggaaaaagagtttattaattttgtgaaaaactacaagaatcccaatctgaccatttccttcactgctgaacgaagtattgaagatgaactaaatcgtgaaagtgacagtgatgtcttcaccgttgtaattagctatgccatcatgtttctatatatttccctagccttggggcacatcaaaagctgtcgcaggcttctggtggattcgaaggtctcactaggcatcgcgggcatcttgatcgtgctgagctcggtggcttgctccttgggtgtcttcagctacattgggttgcccttgaccctcattgtgattgaagtcatcccgttcctggtgctggctgttggagtggacaacatcttcattctggtgcaggcctaccagagagatgaacgtcttcaaggggaaaccctggatcagcagctgggcagggtcctaggagaagtggctcccagtatgttcctgtcatccttttctgagactgtagcatttttcttaggagcattgtccgtgatgccagccgtgcacaccttctctctctttgcgggattggcagtcttcattgactttcttctgcagattacctgtttcgtgagtctcttggggttagacattaaacgtcaagagaaaaatcggctagacatcttttgctgtgtcagaggtgctgaagatggaacaagcgtccaggcctcagagagctgtttgtttcgcttcttcaaaaactcctattctccacttctgctaaaggactggatgagaccaattgtgatagcaatatttgtgggtgttctgtcattcagcatcgcagtcctgaacaaagtagatattggattggatcagtctctttcgatgccagatgactcctacatggtggattatttcaaatccatcagtcagtacctgcatgcgggtccgcctgtgtactttgtcctggaggaagggcacgactacacttcttccaaggggcagaacatggtgtgcggcggcatgggctgcaacaatgattccctggtgcagcagatatttaacgcggcgcagctggacaactatacccgaataggcttcgccccctcgtcctggatcgacgattatttcgactgggtgaagccacagtcgtcttgctgtcgagtggacaatatcactgaccagttctgcaatgcttcagtggttgaccctgcctgcgttcgctgcaggcctctgactccggaaggcaaacagaggcctcaggggggagacttcatgagattcctgcccatgttcctttcggataaccctaaccccaagtgtggcaaagggggacatgctgcctatagttctgcagttaacatcctccttggccatggcaccagggtcggagccacgtacttcatgacctaccacaccgtgctgcagacctctgctgactttattgacgctctgaagaaagcccgacttatagccagtaatgtcaccgaaaccatgggcattaacggcagtgcctaccgagtatttccttacagtgtgttttatgtcttctacgaacagtacctgaccatcattgacgacactatcttcaacctcggtgtgtccctgggcgcgatatttctggtgaccatggtcctcctgggctgtgagctctggtctgcagtcatcatgtgtgccaccatcgccatggtcttggtcaacatgtttggagttatgtggctctggggcatcagtctgaacgctgtatccttggtcaacctggtgatgagctgtggcatctccgtggagttctgcagccacataaccagagcgttcacggtgagcatgaaaggcagccgcgtggagcgcgcggaagaggcacttgcccacatgggcagctccgtgttcagtggaatcacacttacaaaatttggagggattgtggtgttggcttttgccaaatctcaaattttccagatattctacttcaggatgtatttggccatggtcttactgggagccactcacggattaatatttctccctgtcttactcagttacatagggccatcagtaaataaagccaaaagttgtgccactgaagagcgatacaaaggaacagagcgcgaacggcttctaaatttctagctcgaggacggggtgaactacgcctgaggatccgatctttttccctctgccaaaaattatggggacatcatgaagccccttgagcatctgacttctggctaataaaggaaatttattttcattgcaatagtgtgttggaattttttgtgtctctcactcggcctaggtagataagtagcatggcgggttaatcattaactacaaggaacccctagtgatggagttggccactccctctctgcgcgctcgctcgctcactgaggccgggcgaccaaaggtcgcccgacgcccgggctttgcccgggcggcctcagtgagcgagcgagcgcgcag

SEQ ID NO: 1819 - DNA, 4796 bp, Artificial Sequence
  source: /note="Description of Artificial Sequence: Synthetic polynucleotide"
ctgcgcgctcgctcgctcactgaggccgcccgggcaaagcccgggcgtcgggcgacctttggtcgcccggcctcagtgagcgagcgagcgcgcagagagggagtggccaactccatcactaggggttccttgtagttaatgattaacccgccatgctacttatctaccagggtaatggggatcctctagaactatagctaacgcgtcgtgaggctccggtgcccgtcagtgggcagagcgcacatcgcccacagtccccgagaagttggggggaggggtcggcaattgaaccggtgcctagagaaggtggcgcggggtaaactgggaaagtgatgtcgtgtactggctccgcctttttcccgagggtgggggagaaccgtatataagtgcagtagtcgccgtgaacgttctttttcgcaacgggtttgccgccagaacacagcgggagcaagcttcgtttagtgaaccggtaagtatcaaggttacaagacaggtttaaggagaccaatagaaactgggcttgtcgagacagagaagactcttgcgtttctgataggcacctattggtcttactgacatccactttgcctttctctccacaggggattcgaaccggtgccgccaccatgaccgctcgcggcctggcccttggcctcctcctgctgctactgtgtccagcgcaggtgttttcacagtcctgtgtttggtatggagagtgtggaattgcatatggggacaagaggtacaattgcgaatattctggcccaccaaaaccattgccaaaggatggatatgacttagtgcaggaactctgtccaggattcttctttggcaatgtcagtctctgttgtgatgttcggcagcttcagacactaaaagacaacctgcagctgcctctacagtttctgtccagatgtccatcctgtttttataacctactgaacctgttttgtgagctgacatgtagccctcgacagagtcagtttttgaatgttacagctactgaagattatgttgatcctgttacaaaccagacgaaaacaaatgtgaaagagttacaatactacgtcggacagagttttgccaatgcaatgtacaatgcctgccgggatgtggaggccccctcaagtaatgacaaggccctgggactcctgtgtgggaaggacgctgacgcctgtaatgccaccaactggattgaatacatgttcaataaggacaatggacaggcaccttttaccatcactcctgtgttttcagattttccagtccatgggatggagcccatgaacaatgccaccaaaggctgtgacgagtctgtggatgaggtcacagcaccatgtagctgccaagactgctctattgtctgtggccccaagccccagcccccacctcctcctgctccctggacgatccttggcttggacgccatgtatgtcatcatgtggatcacctacatggcgtttttgcttgtgttttttggagcattttttgcagtgtggtgctacagaaaacggtattttgtctccgagtacactcccatcgatagcaatatagctttttctgttaatgcaagtgacaaaggagaggcgtcctgctgtgaccctgtcagcgcagcatttgagggctgcttgaggcggctgttcacacgctgggggtctttctgcgtccgaaaccctggctgtgtcattttcttctcgctggtcttcattactgcgtgttcgtcaggcctggtgtttgtccgggtcacaaccaatccagttgacctctggtcagcccccagcagccaggctcgcctggaaaaagagtactttgaccagcactttgggcctttcttccggacggagcagctcatcatccgggcccctctcactgacaaacacatttaccagccatacccttcgggagctgatgtaccctttggacctccgcttgacatacagatactgcaccaggttcttgacttacaaatagccatcgaaaacattactgcctcttatgacaatgagactgtgacacttcaagacatctgcttggcccctctttcaccgtataacacgaactgcaccattttgagtgtgttaaattacttccagaacagccattccgtgctggaccacaagaaaggggacgacttctttgtgtatgccgattaccacacgcactttctgtactgcgtacgggctcctgcctctctgaatgatacaagtttgctccatgacccttgtctgggtacgtttggtggaccagtgttcccgtggcttgtgttgggaggctatgatgatcaaaactacaataacgccactgcccttgtgattaccttccctgtcaataattactataatgatacagagaagctccagagggcccaggcctgggaaaaagagtttattaattttgtgaaaaactacaagaatcccaatctgaccatttccttcactgctgaacgaagtattgaagatgaactaaatcgtgaaagtgacagtgatgtcttcaccgttgtaattagctatgccatcatgtttctatatatttccctagccttggggcacatcaaaagctgtcgcaggcttctggtggattcgaaggtctcactaggcatcgcgggcatcttgatcgtgctgagctcggtggcttgctccttgggtgtcttcagctacattgggttgcccttgaccctcattgtgattgaagtcatcccgttcctggtgctggctgttggagtggacaacatcttcattctggtgcaggcctaccagagagatgaacgtcttcaaggggaaaccctggatcagcagctgggcagggtcctaggagaagtggctcccagtatgttcctgtcatccttttctgagactgtagcatttttcttaggagcattgtccgtgatgccagccgtgcacaccttctctctctttgcgggattggcagtcttcattgactttcttctgcagattacctgtttcgtgagtctcttggggttagacattaaacgtcaagagaaaaatcggctagacatcttttgctgtgtcagaggtgctgaagatggaacaagcgtccaggcctcagagagctgtttgtttcgcttcttcaaaaactcctattctccacttctgctaaaggactggatgagaccaattgtgatagcaatatttgtgggtgttctgtcattcagcatcgcagtcctgaacaaagtagatattggattggatcagtctctttcgatgccagatgactcctacatggtggattatttcaaatccatcagtcagtacctgcatgcgggtccgcctgtgtactttgtcctggaggaagggcacgactacacttcttccaaggggcagaacatggtgtgcggcggcatgggctgcaacaatgattccctggtgcagcagatatttaacgcggcgcagctggacaactatacccgaataggcttcgccccctcgtcctggatcgacgattatttcgactgggtgaagccacagtcgtcttgctgtcgagtggacaatatcactgaccagttctgcaatgcttcagtggttgaccctgcctgcgttcgctgcaggcctctgactccggaaggcaaacagaggcctcaggggggagacttcatgagattcctgcccatgttcctttcggataaccctaaccccaagtgtggcaaagggggacatgctgcctatagttctgcagttaacatcctccttggccatggcaccagggtcggagccacgtacttcatgacctaccacaccgtgctgcagacctctgctgactttattgacgctctgaagaaagcccgacttatagccagtaatgtcaccgaaaccatgggcattaacggcagtgcctaccgagtatttccttacagtgtgttttatgtcttctacgaacagtacctgaccatcattgacgacactatcttcaacctcggtgtgtccctgggcgcgatatttctggtgaccatggtcctcctgggctgtgagctctggtctgcagtcatcatgtgtgccaccatcgccatggtcttggtcaacatgtttggagttatgtggctctggggcatcagtctgaacgctgtatccttggtcaacctggtgatgagctgtggcatctccgtggagttctgcagccacataaccagagcgttcacggtgagcatgaaaggcagccgcgtggagcgcgcggaagaggcacttgcccacatgggcagctccgtgttcagtggaatcacacttacaaaatttggagggattgtggtgttggcttttgccaaatctcaaattttccagatattctacttcaggatgtatttggccatggtcttactgggagccactcacggattaatatttctccctgtcttactcagttacatagggccatcagtaaataaagccaaaagttgtgccactgaagagcgatacaaaggaacagagcgcgaacggcttctaaatttctagctcgaggacggggtgaactacgcctgaggatccgatctttttccctctgccaaaaattatggggacatcatgaagccccttgagcatctgacttctggctaataaaggaaatttattttcattgcaatagtgtgttggaattttttgtgtctctcactcggcctaggtagataagtagcatggcgggttaatcattaactacaaggaacccctagtgatggagttggccactccctctctgcgcgctcgctcgctcactgaggccgggcgaccaaaggtcgcccgacgcccgggctttgcccgggcggcctcagtgagcgagcgagcgcgcag

SEQ ID NO: 1820 - DNA, 4664 bp, Artificial Sequence
  source: /note="Description of Artificial Sequence: Synthetic polynucleotide"
ctgcgcgctcgctcgctcactgaggccgcccgggcaaagcccgggcgtcgggcgacctttggtcgcccggcctcagtgagcgagcgagcgcgcagagagggagtggccaactccatcactaggggttccttgtagttaatgattaacccgccatgctacttatctaccagggtaatggggatcctctagaactatagctaacgcgtggtggagaagagcatgcgtgaggctccggtgcccgtcagtgggcagagcgcacatcgcccacagtccccgagaagttggggggaggggtcggcaattgaaccggtgcctagagaaggtggcgcggggtaaactgggaaagtgatgtcgtgtactggctccgcctttttcccgagggtgggggagaaccgtatataagtgcagtagtcgccgtgaacgttctttttcgcaacgggtttgccgccagaacacagcgggagcaagcttcgtttcgaaccggtgccgccaccatgaccgctcgcggcctggcccttggcctcctcctgctgctactgtgtccagcgcaggtgttttcacagtcctgtgtttggtatggagagtgtggaattgcatatggggacaagaggtacaattgcgaatattctggcccaccaaaaccattgccaaaggatggatatgacttagtgcaggaactctgtccaggattcttctttggcaatgtcagtctctgttgtgatgttcggcagcttcagacactaaaagacaacctgcagctgcctctacagtttctgtccagatgtccatcctgtttttataacctactgaacctgttttgtgagctgacatgtagccctcgacagagtcagtttttgaatgttacagctactgaagattatgttgatcctgttacaaaccagacgaaaacaaatgtgaaagagttacaatactacgtcggacagagttttgccaatgcaatgtacaatgcctgccgggatgtggaggccccctcaagtaatgacaaggccctgggactcctgtgtgggaaggacgctgacgcctgtaatgccaccaactggattgaatacatgttcaataaggacaatggacaggcaccttttaccatcactcctgtgttttcagattttccagtccatgggatggagcccatgaacaatgccaccaaaggctgtgacgagtctgtggatgaggtcacagcaccatgtagctgccaagactgctctattgtctgtggccccaagccccagcccccacctcctcctgctccctggacgatccttggcttggacgccatgtatgtcatcatgtggatcacctacatggcgtttttgcttgtgttttttggagcattttttgcagtgtggtgctacagaaaacggtattttgtctccgagtacactcccatcgatagcaatatagctttttctgttaatgcaagtgacaaaggagaggcgtcctgctgtgaccctgtcagcgcagcatttgagggctgcttgaggcggctgttcacacgctgggggtctttctgcgtccgaaaccctggctgtgtcattttcttctcgctggtcttcattactgcgtgttcgtcaggcctggtgtttgtccgggtcacaaccaatccagttgacctctggtcagcccccagcagccaggctcgcctggaaaaagagtactttgaccagcactttgggcctttcttccggacggagcagctcatcatccgggcccctctcactgacaaacacatttaccagccatacccttcgggagctgatgtaccctttggacctccgcttgacatacagatactgcaccaggttcttgacttacaaatagccatcgaaaacattactgcctcttatgacaatgagactgtgacacttcaagacatctgcttggcccctctttcaccgtataacacgaactgcaccattttgagtgtgttaaattacttccagaacagccattccgtgctggaccacaagaaaggggacgacttctttgtgtatgccgattaccacacgcactttctgtactgcgtacgggctcctgcctctctgaatgatacaagtttgctccatgacccttgtctgggtacgtttggtggaccagtgttcccgtggcttgtgttgggaggctatgatgatcaaaactacaataacgccactgcccttgtgattaccttccctgtcaataattactataatgatacagagaagctccagagggcccaggcctgggaaaaagagtttattaattttgtgaaaaactacaagaatcccaatctgaccatttccttcactgctgaacgaagtattgaagatgaactaaatcgtgaaagtgacagtgatgtcttcaccgttgtaattagctatgccatcatgtttctatatatttccctagccttggggcacatcaaaagctgtcgcaggcttctggtggattcgaaggtctcactaggcatcgcgggcatcttgatcgtgctgagctcggtggcttgctccttgggtgtcttcagctacattgggttgcccttgaccctcattgtgattgaagtcatcccgttcctggtgctggctgttggagtggacaacatcttcattctggtgcaggcctaccagagagatgaacgtcttcaaggggaaaccctggatcagcagctgggcagggtcctaggagaagtggctcccagtatgttcctgtcatccttttctgagactgtagcatttttcttaggagcattgtccgtgatgccagccgtgcacaccttctctctctttgcgggattggcagtcttcattgactttcttctgcagattacctgtttcgtgagtctcttggggttagacattaaacgtcaagagaaaaatcggctagacatcttttgctgtgtcagaggtgctgaagatggaacaagcgtccaggcctcagagagctgtttgtttcgcttcttcaaaaactcctattctccacttctgctaaaggactggatgagaccaattgtgatagcaatatttgtgggtgttctgtcattcagcatcgcagtcctgaacaaagtagatattggattggatcagtctctttcgatgccagatgactcctacatggtggattatttcaaatccatcagtcagtacctgcatgcgggtccgcctgtgtactttgtcctggaggaagggcacgactacacttcttccaaggggcagaacatggtgtgcggcggcatgggctgcaacaatgattccctggtgcagcagatatttaacgcggcgcagctggacaactatacccgaataggcttcgccccctcgtcctggatcgacgattatttcgactgggtgaagccacagtcgtcttgctgtcgagtggacaatatcactgaccagttctgcaatgcttcagtggttgaccctgcctgcgttcgctgcaggcctctgactccggaaggcaaacagaggcctcaggggggagacttcatgagattcctgcccatgttcctttcggataaccctaaccccaagtgtggcaaagggggacatgctgcctatagttctgcagttaacatcctccttggccatggcaccagggtcggagccacgtacttcatgacctaccacaccgtgctgcagacctctgctgactttattgacgctctgaagaaagcccgacttatagccagtaatgtcaccgaaaccatgggcattaacggcagtgcctaccgagtatttccttacagtgtgttttatgtcttctacgaacagtacctgaccatcattgacgacactatcttcaacctcggtgtgtccctgggcgcgatatttctggtgaccatggtcctcctgggctgtgagctctggtctgcagtcatcatgtgtgccaccatcgccatggtcttggtcaacatgtttggagttatgtggctctggggcatcagtctgaacgctgtatccttggtcaacctggtgatgagctgtggcatctccgtggagttctgcagccacataaccagagcgttcacggtgagcatgaaaggcagccgcgtggagcgcgcggaagaggcacttgcccacatgggcagctccgtgttcagtggaatcacacttacaaaatttggagggattgtggtgttggcttttgccaaatctcaaattttccagatattctacttcaggatgtatttggccatggtcttactgggagccactcacggattaatatttctccctgtcttactcagttacatagggccatcagtaaataaagccaaaagttgtgccactgaagagcgatacaaaggaacagagcgcgaacggcttctaaatttctagctcgaggacggggtgaactacgcctgaggatccgatctttttccctctgccaaaaattatggggacatcatgaagccccttgagcatctgacttctggctaataaaggaaatttattttcattgcaatagtgtgttggaattttttgtgtctctcactcggcctaggtagataagtagcatggcgggttaatcattaactacaaggaacccctagtgatggagttggccactccctctctgcgcgctcgctcgctcactgaggccgggcgaccaaaggtcgcccgacgcccgggctttgcccgggcggcctcagtgagcgagcgagcgcgcag

SEQ ID NO: 1821 - DNA, 4675 bp, Artificial Sequence
  source: /note="Description of Artificial Sequence: Synthetic polynucleotide"
ctgcgcgctcgctcgctcactgaggccgcccgggcaaagcccgggcgtcgggcgacctttggtcgcccggcctcagtgagcgagcgagcgcgcagagagggagtggccaactccatcactaggggttccttgtagttaatgattaacccgccatgctacttatctaccagggtaatggggatcctctagaactatagctaacgcgtgtcatcactgaggtggagaagagcatgcgtgaggctccggtgcccgtcagtgggcagagcgcacatcgcccacagtccccgagaagttggggggaggggtcggcaattgaaccggtgcctagagaaggtggcgcggggtaaactgggaaagtgatgtcgtgtactggctccgcctttttcccgagggtgggggagaaccgtatataagtgcagtagtcgccgtgaacgttctttttcgcaacgggtttgccgccagaacacagcgggagcaagcttcgtttcgaaccggtgccgccaccatgaccgctcgcggcctggcccttggcctcctcctgctgctactgtgtccagcgcaggtgttttcacagtcctgtgtttggtatggagagtgtggaattgcatatggggacaagaggtacaattgcgaatattctggcccaccaaaaccattgccaaaggatggatatgacttagtgcaggaactctgtccaggattcttctttggcaatgtcagtctctgttgtgatgttcggcagcttcagacactaaaagacaacctgcagctgcctctacagtttctgtccagatgtccatcctgtttttataacctactgaacctgttttgtgagctgacatgtagccctcgacagagtcagtttttgaatgttacagctactgaagattatgttgatcctgttacaaaccagacgaaaacaaatgtgaaagagttacaatactacgtcggacagagttttgccaatgcaatgtacaatgcctgccgggatgtggaggccccctcaagtaatgacaaggccctgggactcctgtgtgggaaggacgctgacgcctgtaatgccaccaactggattgaatacatgttcaataaggacaatggacaggcaccttttaccatcactcctgtgttttcagattttccagtccatgggatggagcccatgaacaatgccaccaaaggctgtgacgagtctgtggatgaggtcacagcaccatgtagctgccaagactgctctattgtctgtggccccaagccccagcccccacctcctcctgctccctggacgatccttggcttggacgccatgtatgtcatcatgtggatcacctacatggcgtttttgcttgtgttttttggagcattttttgcagtgtggtgctacagaaaacggtattttgtctccgagtacactcccatcgatagcaatatagctttttctgttaatgcaagtgacaaaggagaggcgtcctgctgtgaccctgtcagcgcagcatttgagggctgcttgaggcggctgttcacacgctgggggtctttctgcgtccgaaaccctggctgtgtcattttcttctcgctggtcttcattactgcgtgttcgtcaggcctggtgtttgtccgggtcacaaccaatccagttgacctctggtcagcccccagcagccaggctcgcctggaaaaagagtactttgaccagcactttgggcctttcttccggacggagcagctcatcatccgggcccctctcactgacaaacacatttaccagccatacccttcgggagctgatgtaccctttggacctccgcttgacatacagatactgcaccaggttcttgacttacaaatagccatcgaaaacattactgcctcttatgacaatgagactgtgacacttcaagacatctgcttggcccctctttcaccgtataacacgaactgcaccattttgagtgtgttaaattacttccagaacagccattccgtgctggaccacaagaaaggggacgacttctttgtgtatgccgattaccacacgcactttctgtactgcgtacgggctcctgcctctctgaatgatacaagtttgctccatgacccttgtctgggtacgtttggtggaccagtgttcccgtggcttgtgttgggaggctatgatgatcaaaactacaataacgccactgcccttgtgattaccttccctgtcaataattactataatgatacagagaagctccagagggcccaggcctgggaaaaagagtttattaattttgtgaaaaactacaagaatcccaatctgaccatttccttcactgctgaacgaagtattgaagatgaactaaatcgtgaaagtgacagtgatgtcttcaccgttgtaattagctatgccatcatgtttctatatatttccctagccttggggcacatcaaaagctgtcgcaggcttctggtggattcgaaggtctcactaggcatcgcgggcatcttgatcgtgctgagctcggtggcttgctccttgggtgtcttcagctacattgggttgcccttgaccctcattgtgattgaagtcatcccgttcctggtgctggctgttggagtggacaacatcttcattctggtgcaggcctaccagagagatgaacgtcttcaaggggaaaccctggatcagcagctgggcagggtcctaggagaagtggctcccagtatgttcctgtcatccttttctgagactgtagcatttttcttaggagcattgtccgtgatgccagccgtgcacaccttctctctctttgcgggattggcagtcttcattgactttcttctgcagattacctgtttcgtgagtctcttggggttagacattaaacgtcaagagaaaaatcggctagacatcttttgctgtgtcagaggtgctgaagatggaacaagcgtccaggcctcagagagctgtttgtttcgcttcttcaaaaactcctattctccacttctgctaaaggactggatgagaccaattgtgatagcaatatttgtgggtgttctgtcattcagcatcgcagtcctgaacaaagtagatattggattggatcagtctctttcgatgccagatgactcctacatggtggattatttcaaatccatcagtcagtacctgcatgcgggtccgcctgtgtactttgtcctggaggaagggcacgactacacttcttccaaggggcagaacatggtgtgcggcggcatgggctgcaacaatgattccctggtgcagcagatatttaacgcggcgcagctggacaactatacccgaataggcttcgccccctcgtcctggatcgacgattatttcgactgggtgaagccacagtcgtcttgctgtcgagtggacaatatcactgaccagttctgcaatgcttcagtggttgaccctgcctgcgttcgctgcaggcctctgactccggaaggcaaacagaggcctcaggggggagacttcatgagattcctgcccatgttcctttcggataaccctaaccccaagtgtggcaaagggggacatgctgcctatagttctgcagttaacatcctccttggccatggcaccagggtcggagccacgtacttcatgacctaccacaccgtgctgcagacctctgctgactttattgacgctctgaagaaagcccgacttatagccagtaatgtcaccgaaaccatgggcattaacggcagtgcctaccgagtatttccttacagtgtgttttatgtcttctacgaacagtacctgaccatcattgacgacactatcttcaacctcggtgtgtccctgggcgcgatatttctggtgaccatggtcctcctgggctgtgagctctggtctgcagtcatcatgtgtgccaccatcgccatggtcttggtcaacatgtttggagttatgtggctctggggcatcagtctgaacgctgtatccttggtcaacctggtgatgagctgtggcatctccgtggagttctgcagccacataaccagagcgttcacggtgagcatgaaaggcagccgcgtggagcgcgcggaagaggcacttgcccacatgggcagctccgtgttcagtggaatcacacttacaaaatttggagggattgtggtgttggcttttgccaaatctcaaattttccagatattctacttcaggatgtatttggccatggtcttactgggagccactcacggattaatatttctccctgtcttactcagttacatagggccatcagtaaataaagccaaaagttgtgccactgaagagcgatacaaaggaacagagcgcgaacggcttctaaatttctagctcgaggacggggtgaactacgcctgaggatccgatctttttccctctgccaaaaattatggggacatcatgaagccccttgagcatctgacttctggctaataaaggaaatttattttcattgcaatagtgtgttggaattttttgtgtctctcactcggcctaggtagataagtagcatggcgggttaatcattaactacaaggaacccctagtgatggagttggccactccctctctgcgcgctcgctcgctcactgaggccgggcgaccaaaggtcgcccgacgcccgggctttgcccgggcggcctcagtgagcgagcgagcgcgcag

SEQ ID NO: 1822 - DNA, 222 bp, Artificial Sequence
  source: /note="Description of Artificial Sequence: Synthetic polynucleotide"
gcccgtcagtgggcagagcgcacatcgcccacagtccccgagaagttggggggaggggtcggcaattgaaccggtgcctagagaaggtggcgcggggtaaactgggaaagtgatgtcgtgtactggctccgcctttttcccgagggtgggggagaaccgtatataagtgcagtagtcgccgtgaacgttctttttcgcaacgggtttgccgccagaacacag

SEQ ID NO: 1823 - DNA, 222 bp, Artificial Sequence
  source: /note="Description of Artificial Sequence: Synthetic polynucleotide"
gcccgtcagtgggcagagcgcacatcgcccacagtccccgagaagttggggggaggggtcggcaattgaaccggtgcctagagaaggtggcgcggggtaaactgggaaagtgatgtcgtgtactggctccgcctttttcccgagggtgggggagaaccgtatataagtgcagtagtcgccgtgaacgttctttttcgcaacgggtttgccgccagaacacgc

SEQ ID NO: 1824 - DNA, 4777 bp, Artificial Sequence; identical to SEQ ID NO: 1802
  source: /note="Description of Artificial Sequence: Synthetic polynucleotide"

SEQ ID NO: 1825 - DNA, 4648 bp, Artificial Sequence; identical to SEQ ID NO: 1817
  source: /note="Description of Artificial Sequence: Synthetic polynucleotide"

SEQ ID NO: 1826 - DNA, 4796 bp, Artificial Sequence; identical to SEQ ID NO: 1819
  source: /note="Description of Artificial Sequence: Synthetic polynucleotide"

SEQ ID NO: 1827 - DNA, 4648 bp, Artificial Sequence; identical to SEQ ID NO: 1799
  source: /note="Description of Artificial Sequence: Synthetic polynucleotide"

SEQ ID NO: 1828 - DNA, 4796 bp, Artificial Sequence; identical to SEQ ID NO: 1800
  source: /note="Description of Artificial Sequence: Synthetic polynucleotide"

SEQ ID NO: 1829 - DNA, 4777 bp, Artificial Sequence; identical to SEQ ID NO: 1809
  source: /note="Description of Artificial Sequence: Synthetic polynucleotide"

SEQ ID NO: 1830 - DNA, 4629 bp, Artificial Sequence; identical to SEQ ID NO: 1801
  source: /note="Description of Artificial Sequence: Synthetic polynucleotide"

SEQ ID NO: 1831 - DNA, 4777 bp, Artificial Sequence; identical to SEQ ID NO: 1802
  source: /note="Description of Artificial Sequence: Synthetic polynucleotide"

SEQ ID NO: 1832 - DNA, 4639 bp, Artificial Sequence; identical to SEQ ID NO: 1753
  source: /note="Description of Artificial Sequence: Synthetic polynucleotide"

SEQ ID NO: 1833 - DNA, 5059 bp, Artificial Sequence
  source: /note="Description of Artificial Sequence: Synthetic polynucleotide"
ctgcgcgctcgctcgctcactgaggccgcccgggcaaagcccgggcgtcgggcgacctttggtcgcccggcctcagtgagcgagcgagcgcgcagagagggagtggccaactccatcactaggggttccttgtagttaatgattaacccgccatgctacttatctaccagggtaatggggatcctctagaactatagctaacgcgtcgacattgattattgactagttattaatagtaatcaattacggggtcattagttcatagcccatatatggagttccgcgttacataacttacggtaaatggcccgcctggctgaccgcccaacgacccccgcccattgacgtcaataatgacgtatgttcccatagtaacgccaatagggactttccattgacgtcaatgggtggagtatttacggtaaactgcccacttggcagtacatcaagtgtatcatatgccaagtacgccccctattgacgtcaatgacggtaaatggcccgcctggcattatgcccagtacatgaccttatgggactttcctacttggcagtacatctacgtattagtcatcgctattaccatgtcgaggccacgttctgcttcactctccccatctcccccccctccccacccccaattttgtatttatttattttttaattattttgtgcagcgatgggggcggggggggggggcgcgcgccaggcggggcggggcggggcgaggggcggggcggggcgaggcggagaggtgcggcggcagccaatcagagcggcgcgctccgaaagtttccttttatggcgaggcggcggcggcggcggccctataaaaagcgaagcgcgcggcgggcgggagcaagcttcgtttcgaaccggtgccgccaccatgaccgctcgcggcctggcccttggcctcctcctgctgctactgtgtccagcgcaggtgttttcacagtcctgtgtttggtatggagagtgtggaattgcatatggggacaagaggtacaattgcgaatattctggcccaccaaaaccattgccaaaggatggatatgacttagtgcaggaactctgtccaggattcttctttggcaatgtcagtctctgttgtgatgttcggcagcttcagacactaaaagacaacctgcagctgcctctacagtttctgtccagatgtccatcctgtttttataacctactgaacctgttttgtgagctgacatgtagccctcgacagagtcagtttttgaatgttacagctactgaagattatgttgatcctgttacaaaccagacgaaaacaaatgtgaaagagttacaatactacgtcggacagagttttgccaatgcaatgtacaatgcctgccgggatgtggaggccccctcaagtaatgacaaggccctgggactcctgtgtgggaaggacgctgacgcctgtaatgccaccaactggattgaatacatgttcaataaggacaatggacaggcaccttttaccatcactcctgtgttttcagattttccagtccatgggatggagcccatgaacaatgccaccaaaggctgtgacgagtctgtggatgaggtcacagcaccatgtagctgccaagactgctctattgtctgtggccccaagccccagcccccacctcctcctgctccctggacgatccttggcttggacgccatgtatgtcatcatgtggatcacctacatggcgtttttgcttgtgttttttggagcattttttgcagtgtggtgctacagaaaacggtattttgtctccgagtacactcccatcgatagcaatatagctttttctgttaatgcaagtgacaaaggagaggcgtcctgctgtgaccctgtcagcgcagcatttgagggctgcttgaggcggctgttcacacgctgggggtctttctgcgtccgaaaccctggctgtgtcattttcttctcgctggtcttcattactgcgtgttcgtcaggcctggtgtttgtccgggtcacaaccaatccagttgacctctggtcagcccccagcagccaggctcgcctggaaaaagagtactttgaccagcactttgggcctttcttccggacggagcagctcatcatccgggcccctctcactgacaaacacatttaccagccatacccttcgggagctgatgtaccctttggacctccgcttgacatacagatactgcaccaggttcttgacttacaaatagccatcgaaaacattactgcctcttatgacaatgagactgtgacacttcaagacatctgcttggcccctctttcaccgtataacacgaactgcaccattttgagtgtgttaaattacttccagaacagccattccgtgctggaccacaagaaaggggacgacttctttgtgtatgccgattaccacacgcactttctgtactgcgtacgggctcctgcctctctgaatgatacaagtttgctccatgacccttgtctgggtacgtttggtggaccagtgttcccgtggcttgtgttgggaggctatgatgatcaaaactacaataacgccactgcccttgtgattaccttccctgtcaataattactataatgatacagagaagctccagagggcccaggcctgggaaaaagagtttattaattttgtgaaaaactacaagaatcccaatctgaccatttccttcactgctgaacgaagtattgaagatgaactaaatcgtgaaagtgacagtgatgtcttcaccgttgtaattagctatgccatcatgtttctatatatttccctagccttggggcacatcaaaagctgtcgcaggcttctggtggattcgaaggtctcactaggcatcgcgggcatcttgatcgtgctgagctcggtggcttgctccttgggtgtcttcagctacattgggttgcccttgaccctcattgtgattgaagtcatcccgttcctggtgctggctgttggagtggacaacatcttcattctggtgcaggcctaccagagagatgaacgtcttcaaggggaaaccctggatcagcagctgggcagggtcctaggagaagtggctcccagtatgttcctgtcatccttttctgagactgtagcatttttcttaggagcattgtccgtgatgccagccgtgcacaccttctctctctttgcgggattggcagtcttcattgactttcttctgcagattacctgtttcgtgagtctcttggggttagacattaaacgtcaagagaaaaatcggctagacatcttttgctgtgtcagaggtgctgaagatggaacaagcgtccaggcctcagagagctgtttgtttcgcttcttcaaaaactcctattctccacttctgctaaaggactggatgagaccaattgtgatagcaatatttgtgggtgttctgtcattcagcatcgcagtcctgaacaaagtagatattggattggatcagtctctttcgatgccagatgactcctacatggtggattatttcaaatccatcagtcagtacctgcatgcgggtccgcctgtgtactttgtcctggaggaagggcacgactacacttcttccaaggggcagaacatggtgtgcggcggcatgggctgcaacaatgattccctggtgcagcagatatttaacgcggcgcagctggacaactatacccgaataggcttcgccccctcgtcctggatcgacgattatttcgactgggtgaagccacagtcgtcttgctgtcgagtggacaatatcactgaccagttctgcaatgcttcagtggttgaccctgcctgcgttcgctgcaggcctctgactccggaaggcaaacagaggcctcaggggggagacttcatgagattcctgcccatgttcctttcggataaccctaaccccaagtgtggcaaagggggacatgctgcctatagttctgcagttaacatcctccttggccatggcaccagggtcggagccacgtacttcatgacctaccacaccgtgctgcagacctctgctgactttattgacgctctgaagaaagcccgacttatagccagtaatgtcaccgaaaccatgggcattaacggcagtgcctaccgagtatttccttacagtgtgttttatgtcttctacgaacagtacctgaccatcattgacgacactatcttcaacctcggtgtgtccctgggcgcgatatttctggtgaccatggtcctcctgggctgtgagctctggtctgcagtcatcatgtgtgccaccatcgccatggtcttggtcaacatgtttggagttatgtggctctggggcatcagtctgaacgctgtatccttggtcaacctggtgatgagctgtggcatctccgtggagttctgcagccacataaccagagcgttcacggtgagcatgaaaggcagccgcgtggagcgcgcggaagaggcacttgcccacatgggcagctccgtgttcagtggaatcacacttacaaaatttggagggattgtggtgttggcttttgccaaatctcaaattttccagatattctacttcaggatgtatttggccatggtcttactgggagccactcacggattaatatttctccctgtcttactcagttacatagggccatcagtaaataaagccaaaagttgtgccactgaagagcgatacaaaggaacagagcgcgaacggcttctaaatttctagctcgaggacggggtgaactacgcctgaggatccgatctttttccctctgccaaaaattatggggacatcatgaagccccttgagcatctgacttctggctaataaaggaaatttattttcattgcaatagtgtgttggaattttttgtgtctctcactcggcctaggtagataagtagcatggcgggttaatcattaactacaaggaacccctagtgatggagttggccactccctctctgcgcgctcgctcgctcactgaggccgggcgaccaaaggtcgcccgacgcccgggctttgcccgggcggcctcagtgagcgagcgagcgcgcag

SEQ ID NO: 1834 - DNA, 4824 bp, Artificial Sequence
  source: /note="Description of Artificial Sequence: Synthetic polynucleotide"
ctgcgcgctcgctcgctcactgaggccgcccgggcaaagcccgggcgtcgggcgacctttggtcgcccggcctcagtgagcgagcgagcgcgcagagagggagtggccaactccatcactaggggttccttgtagttaatgattaacccgccatgctacttatctaccagggtaatggggatcctctagaactatagctaacgcgttacatcaagtgtatcatatgccaagtacgccccctattgacgtcaatgacggtaaatggcccgcctggcattatgcccagtacatgaccttatgggactttcctacttggcagtacatctacgtattagtcatcgctattaccatgtcgaggccacgttctgcttcactctccccatctcccccccctccccacccccaattttgtatttatttattttttaattattttgtgcagcgatgggggcggggggggggggcgcgcgccaggcggggcggggcggggcgaggggcggggcggggcgaggcggagaggtgcggcggcagccaatcagagcggcgcgctccgaaagtttccttttatggcgaggcggcggcggcggcggccctataaaaagcgaagcgcgcggcgggcgggagcaagcttcgtttcgaaccggtgccgccaccatgaccgctcgcggcctggcccttggcctcctcctgctgctactgtgtccagcgcaggtgttttcacagtcctgtgtttggtatggagagtgtggaattgcatatggggacaagaggtacaattgcgaatattctggcccaccaaaaccattgccaaaggatggatatgacttagtgcaggaactctgtccaggattcttctttggcaatgtcagtctctgttgtgatgttcggcagcttcagacactaaaagacaacctgcagctgcctctacagtttctgtccagatgtccatcctgtttttataacctactgaacctgttttgtgagctgacatgtagccctcgacagagtcagtttttgaatgttacagctactgaagattatgttgatcctgttacaaaccagacgaaaacaaatgtgaaagagttacaatactacgtcggacagagttttgccaatgcaatgtacaatgcctgccgggatgtggaggccccctcaagtaatgacaaggccctgggactcctgtgtgggaaggacgctgacgcctgtaatgccaccaactggattgaatacatgttcaataaggacaatggacaggcaccttttaccatcactcctgtgttttcagattttccagtccatgggatggagcccatgaacaatgccaccaaaggctgtgacgagtctgtggatgaggtcacagcaccatgtagctgccaagactgctctattgtctgtggccccaagccccagcccccacctcctcctgctccctggacgatccttggcttggacgccatgtatgtcatcatgtggatcacctacatggcgtttttgcttgtgttttttggagcattttttgcagtgtggtgctacagaaaacggtattttgtctccgagtacactcccatcgatagcaatatagctttttctgttaatgcaagtgacaaaggagaggcgtcctgctgtgaccctgtcagcgcagcatttgagggctgcttgaggcggctgttcacacgctgggggtctttctgcgtccgaaaccctggctgtgtcattttcttctcgctggtcttcattactgcgtgttcgtcaggcctggtgtttgtccgggtcacaaccaatccagttgacctctggtcagcccccagcagccaggctcgcctggaaaaagagtactttgaccagcactttgggcctttcttccggacggagcagctcatcatccgggcccctctcactgacaaacacatttaccagccatacccttcgggagctgatgtaccctttggacctccgcttgacatacagatactgcaccaggttcttgacttacaaatagccatcgaaaacattactgcctcttatgacaatgagactgtgacacttcaagacatctgcttggcccctctttcaccgtataacacgaactgcaccattttgagtgtgttaaattacttccagaacagccattccgtgctggaccacaagaaaggggacgacttctttgtgtatgccgattaccacacgcactttctgtactgcgtacgggctcctgcctctctgaatgatacaagtttgctccatgacccttgtctgggtacgtttggtggaccagtgttcccgtggcttgtgttgggaggctatgatgatcaaaactacaataacgccactgcccttgtgattaccttccctgtcaataattactataatgatacagagaagctccagagggcccaggcctgggaaaaagagtttattaattttgtgaaaaactacaagaatcccaatctgaccatttccttcactgctgaacgaagtattgaagatgaactaaatcgtgaaagtgacagtgatgtcttcaccgttgtaattagctatgccatcatgtttctatatatttccctagccttggggcacatcaaaagctgtcgcaggcttctggtggattcgaaggtctcactaggcatcgcgggcatcttgatcgtgctgagctcggtggcttgctccttgggtgtcttcagctacattgggttgcccttgaccctcattgtgattgaagtcatcccgttcctggtgctggctgttggagtggacaacatcttcattctggtgcaggcctaccagagagatgaacgtcttcaaggggaaaccctggatcagcagctgggcagggtcctaggagaagtggctcccagtatgttcctgtcatccttttctgagactgtagcatttttcttaggagcattgtccgtgatgccagccgtgcacaccttctctctctttgcgggattggcagtcttcattgactttcttctgcagattacctgtttcgtgagtctcttggggttagacattaaacgtcaagagaaaaatcggctagacatcttttgctgtgtcagaggtgctgaagatggaacaagcgtccaggcctcagagagctgtttgtttcgcttcttcaaaaactcctattctccacttctgctaaaggactggatgagaccaattgtgatagcaatatttgtgggtgttctgtcattcagcatcgcagtcctgaacaaagtagatattggattggatcagtctctttcgatgccagatgactcctacatggtggattatttcaaatccatcagtcagtacctgcatgcgggtccgcctgtgtactttgtcctggaggaagggcacgactacacttcttccaaggggcagaacatggtgtgcggcggcatgggctgcaacaatgattccctggtgcagcagatatttaacgcggcgcagctggacaactatacccgaataggcttcgccccctcgtcctggatcgacgattatttcgactgggtgaagccacagtcgtcttgctgtcgagtggacaatatcactgaccagttctgcaatgcttcagtggttgaccctgcctgcgttcgctgcaggcctctgactccggaaggcaaacagaggcctcaggggggagacttcatgagattcctgcccatgttcctttcggataaccctaaccccaagtgtggcaaagggggacatgctgcctatagttctgcagttaacatcctccttggccatggcaccagggtcggagccacgtacttcatgacctaccacaccgtgctgcagacctctgctgactttattgacgctctgaagaaagcccgacttatagccagtaatgtcaccgaaaccatgggcattaacggcagtgcctaccgagtatttccttacagtgtgttttatgtcttctacgaacagtacctgaccatcattgacgacactatcttcaacctcggtgtgtccctgggcgcgatatttctggtgaccatggtcctcctgggctgtgagctctggtctgcagtcatcatgtgtgccaccatcgccatggtcttggtcaacatgtttggagttatgtggctctggggcatcagtctgaacgctgtatccttggtcaacctggtgatgagctgtggcatctccgtggagttctgcagccacataaccagagcgttcacggtgagcatgaaaggcagccgcgtggagcgcgcggaagaggcacttgcccacatgggcagctccgtgttcagtggaatcacacttacaaaatttggagggattgtggtgttggcttttgccaaatctcaaattttccagatattctacttcaggatgtatttggccatggtcttactgggagccactcacggattaatatttctccctgtcttactcagttacatagggccatcagtaaataaagccaaaagttgtgccactgaagagcgatacaaaggaacagagcgcgaacggcttctaaatttctagctcgaggacggggtgaactacgcctgaggatccgatctttttccctctgccaaaaattatggggacatcatgaagccccttgagcatctgacttctggctaataaaggaaatttattttcattgcaatagtgtgttggaattttttgtgtctctcactcggcctaggtagataagtagcatggcgggttaatcattaactacaaggaacccctagtgatggagttggccactccctctctgcgcgctcgctcgctcactgaggccgggcgaccaaaggtcgcccgacgcccgggctttgcccgggcggcctcagtgagcgagcgagcgcgcag

SEQ ID NO: 1835 - DNA, 4701 bp, Artificial Sequence
  source: /note="Description of Artificial Sequence: Synthetic polynucleotide"
ctgcgcgctcgctcgctcactgaggccgcccgggcaaagcccgggcgtcgggcgacctttggtcgcccggcctcagtgagcgagcgagcgcgcagagagggagtggccaactccatcactaggggttccttgtagttaatgattaacccgccatgctacttatctaccagggtaatggggatcctctagaactatagctaacgcgtgcctggcattatgcccagtacatgaccttatgggactttcctacttggcagtacatctacgtattagtcatcgctattaccatggtgatgcggttttggcagtacatcaatgggcgtggatagcggtttgactcacggggatttccaagtctccaccccattgacgtcaatgggagtttgttttggcaccaaaatcaacgggactttccaaaatgtcgtaacaactccgccccattgacgcaaatgggcggtaggcgtgtacggtgggaggtctatataagcagagctccgggagcaagcttcgtttcgaaccggtgccgccaccatgaccgctcgcggcctggcccttggcctcctcctgctgctactgtgtccagcgcaggtgttttcacagtcctgtgtttggtatggagagtgtggaattgcatatggggacaagaggtacaattgcgaatattctggcccaccaaaaccattgccaaaggatggatatgacttagtgcaggaactctgtccaggattcttctttggcaatgtcagtctctgttgtgatgttcggcagcttcagacactaaaagacaacctgcagctgcctctacagtttctgtccagatgtccatcctgtttttataacctactgaacctgttttgtgagctgacatgtagccctcgacagagtcagtttttgaatgttacagctactgaagattatgttgatcctgttacaaaccagacgaaaacaaatgtgaaagagttacaatactacgtcggacagagttttgccaatgcaatgtacaatgcctgccgggatgtggaggccccctcaagtaatgacaaggccctgggactcctgtgtgggaaggacgctgacgcctgtaatgccaccaactggattgaatacatgttcaataaggacaatggacaggcaccttttaccatcactcctgtgttttcagattttccagtccatgggatggagcccatgaacaatgccaccaaaggctgtgacgagtctgtggatgaggtcacagcaccatgtagctgccaagactgctctattgtctgtggccccaagccccagcccccacctcctcctgctccctggacgatccttggcttggacgccatgtatgtcatcatgtggatcacctacatggcgtttttgcttgtgttttttggagcattttttgcagtgtggtgctacagaaaacggtattttgtctccgagtacactcccatcgatagcaatatagctttttctgttaatgcaagtgacaaaggagaggcgtcctgctgtgaccctgtcagcgcagcatttgagggctgcttgaggcggctgttcacacgctgggggtctttctgcgtccgaaaccctggctgtgtcattttcttctcgctggtcttcattactgcgtgttcgtcaggcctggtgtttgtccgggtcacaaccaatccagttgacctctggtcagcccccagcagccaggctcgcctggaaaaagagtactttgaccagcactttgggcctttcttccggacggagcagctcatcatccgggcccctctcactgacaaacacatttaccagccatacccttcgggagctgatgtaccctttggacctccgcttgacatacagatactgcaccaggttcttgacttacaaatagccatcgaaaacattactgcctcttatgacaatgagactgtgacacttcaagacatctgcttggcccctctttcaccgtataacacgaactgcaccattttgagtgtgttaaattacttccagaacagccattccgtgctggaccacaagaaaggggacgacttctttgtgtatgccgattaccacacgcactttctgtactgcgtacgggctcctgcctctctgaatgatacaagtttgctccatgacccttgtctgggtacgtttggtggaccagtgttcccgtggcttgtgttgggaggctatgatgatcaaaactacaataacgccactgcccttgtgattaccttccctgtcaataattactataatgatacagagaagctccagagggcccaggcctgggaaaaagagtttattaattttgtgaaaaactacaagaatcccaatctgaccatttccttcactgctgaacgaagtattgaagatgaactaaatcgtgaaagtgacagtgatgtcttcaccgttgtaattagctatgccatcatgtttctatatatttccctagccttggggcacatcaaaagctgtcgcaggcttctggtggattcgaaggtctcactaggcatcgcgggcatcttgatcgtgctgagctcggtggcttgctccttgggtgtcttcagctacattgggttgcccttgaccctcattgtgattgaagtcatcccgttcctggtgctggctgttggagtggacaacatcttcattctggtgcaggcctaccagagagatgaacgtcttcaaggggaaaccctggatcagcagctgggcagggtcctaggagaagtggctcccagtatgttcctgtcatccttttctgagactgtagcatttttcttaggagcattgtccgtgatgccagccgtgcacaccttctctctctttgcgggattggcagtcttcattgactttcttctgcagattacctgtttcgtgagtctcttggggttagacattaaacgtcaagagaaaaatcggctagacatcttttgctgtgtcagaggtgctgaagatggaacaagcgtccaggcctcagagagctgtttgtttcgcttcttcaaaaactcctattctccacttctgctaaaggactggatgagaccaattgtgatagcaatatttgtgggtgttctgtcattcagcatcgcagtcctgaacaaagtagatattggattggatcagtctctttcgatgccagatgactcctacatggtggattatttcaaatccatcagtcagtacctgcatgcgggtccgcctgtgtactttgtcctggaggaagggcacgactacacttcttccaaggggcagaacatggtgtgcggcggcatgggctgcaacaatgattccctggtgcagcagatatttaacgcggcgcagctggacaactatacccgaataggcttcgccccctcgtcctggatcgacgattatttcgactgggtgaagccacagtcgtcttgctgtcgagtggacaatatcactgaccagttctgcaatgcttcagtggttgaccctgcctgcgttcgctgcaggcctctgactccggaaggcaaacagaggcctcaggggggagacttcatgagattcctgcccatgttcctttcggataaccctaaccccaagtgtggcaaagggggacatgctgcctatagttctgcagttaacatcctccttggccatggcaccagggtcggagccacgtacttcatgacctaccacaccgtgctgcagacctctgctgactttattgacgctctgaagaaagcccgacttatagccagtaatgtcaccgaaaccatgggcattaacggcagtgcctaccgagtatttccttacagtgtgttttatgtcttctacgaacagtacctgaccatcattgacgacactatcttcaacctcggtgtgtccctgggcgcgatatttctggtgaccatggtcctcctgggctgtgagctctggtctgcagtcatcatgtgtgccaccatcgccatggtcttggtcaacatgtttggagttatgtggctctggggcatcagtctgaacgctgtatccttggtcaacctggtgatgagctgtggcatctccgtggagttctgcagccacataaccagagcgttcacggtgagcatgaaaggcagccgcgtggagcgcgcggaagaggcacttgcccacatgggcagctccgtgttcagtggaatcacacttacaaaatttggagggattgtggtgttggcttttgccaaatctcaaattttccagatattctacttcaggatgtatttggccatggtcttactgggagccactcacggattaatatttctccctgtcttactcagttacatagggccatcagtaaataaagccaaaagttgtgccactgaagagcgatacaaaggaacagagcgcgaacggcttctaaatttctagctcgaggacggggtgaactacgcctgaggatccgatctttttccctctgccaaaaattatggggacatcatgaagccccttgagcatctgacttctggctaataaaggaaatttattttcattgcaatagtgtgttggaattttttgtgtctctcactcggcctaggtagataagtagcatggcgggttaatcattaactacaaggaacccctagtgatggagttggccactccctctctgcgcgctcgctcgctcactgaggccgggcgaccaaaggtcgcccgacgcccgggctttgcccgggcggcctcagtgagcgagcgagcgcgcag

SEQ ID NO: 1836 - DNA, 4575 bp, Artificial Sequence
  source: /note="Description of Artificial Sequence: Synthetic polynucleotide"
ctgcgcgctcgctcgctcactgaggccgcccgggcaaagcccgggcgtcgggcgacctttggtcgcccggcctcagtgagcgagcgagcgcgcagagagggagtggccaactccatcactaggggttccttgtagttaatgattaacccgccatgctacttatctaccagggtaatggggatcctctagaactatagctaacgcgttttgactcacggggatttccaagtctccaccccattgacgtcaatgggagtttgttttggcaccaaaatcaacgggactttccaaaatgtcgtaacaactccgccccattgacgcaaatgggcggtaggcgtgtacggtgggaggtctatataagcagagctccgggagcaagcttcgtttcgaaccggtgccgccaccatgaccgctcgcggcctggcccttggcctcctcctgctgctactgtgtccagcgcaggtgttttcacagtcctgtgtttggtatggagagtgtggaattgcatatggggacaagaggtacaattgcgaatattctggcccaccaaaaccattgccaaaggatggatatgacttagtgcaggaactctgtccaggattcttctttggcaatgtcagtctctgttgtgatgttcggcagcttcagacactaaaagacaacctgcagctgcctctacagtttctgtccagatgtccatcctgtttttataacctactgaacctgttttgtgagctgacatgtagccctcgacagagtcagtttttgaatgttacagctactgaagattatgttgatcctgttacaaaccagacgaaaacaaatgtgaaagagttacaatactacgtcggacagagttttgccaatgcaatgtacaatgcctgccgggatgtggaggccccctcaagtaatgacaaggccctgggactcctgtgtgggaaggacgctgacgcctgtaatgccaccaactggattgaatacatgttcaataaggacaatggacaggcaccttttaccatcactcctgtgttttcagattttccagtccatgggatggagcccatgaacaatgccaccaaaggctgtgacgagtctgtggatgaggtcacagcaccatgtagctgccaagactgctctattgtctgtggccccaagccccagcccccacctcctcctgctccctggacgatccttggcttggacgccatgtatgtcatcatgtggatcacctacatggcgtttttgcttgtgttttttggagcattttttgcagtgtggtgctacagaaaacggtattttgtctccgagtacactcccatcgatagcaatatagctttttctgttaatgcaagtgacaaaggagaggcgtcctgctgtgaccctgtcagcgcagcatttgagggctgcttgaggcggctgttcacacgctgggggtctttctgcgtccgaaaccctggctgtgtcattttcttctcgctggtcttcattactgcgtgttcgtcaggcctggtgtttgtccgggtcacaaccaatccagttgacctctggtcagcccccagcagccaggctcgcctggaaaaagagtactttgaccagcactttgggcctttcttccggacggagcagctcatcatccgggcccctctcactgacaaacacatttaccagccatacccttcgggagctgatgtaccctttggacctccgcttgacatacagatactgcaccaggttcttgacttacaaatagccatcgaaaacattactgcctcttatgacaatgagactgtgacacttcaagacatctgcttggcccctctttcaccgtataacacgaactgcaccattttgagtgtgttaaattacttccagaacagccattccgtgctggaccacaagaaaggggacgacttctttgtgtatgccgattaccacacgcactttctgtactgcgtacgggctcctgcctctctgaatgatacaagtttgctccatgacccttgtctgggtacgtttggtggaccagtgttcccgtggcttgtgttgggaggctatgatgatcaaaactacaataacgccactgcccttgtgattaccttccctgtcaataattactataatgatacagagaagctccagagggcccaggcctgggaaaaagagtttattaattttgtgaaaaactacaagaatcccaatctgaccatttccttcactgctgaacgaagtattgaagatgaactaaatcgtgaaagtgacagtgatgtcttcaccgttgtaattagctatgccatcatgtttctatatatttccctagccttggggcacatcaaaagctgtcgcaggcttctggtggattcgaaggtctcactaggcatcgcgggcatcttgatcgtgctgagctcggtggcttgctccttgggtgtcttcagctacattgggttgcccttgaccctcattgtgattgaagtcatcccgttcctggtgctggctgttggagtggacaacatcttcattctggtgcaggcctaccagagagatgaacgtcttcaaggggaaaccctggatcagcagctgggcagggtcctaggagaagtggctcccagtatgttcctgtcatccttttctgagactgtagcatttttcttaggagcattgtccgtgatgccagccgtgcacaccttctctctctttgcgggattggcagtcttcattgactttcttctgcagattacctgtttcgtgagtctcttggggttagacattaaacgtcaagagaaaaatcggctagacatcttttgctgtgtcagaggtgctgaagatggaacaagcgtccaggcctcagagagctgtttgtttcgcttcttcaaaaactcctattctccacttctgctaaaggactggatgagaccaattgtgatagcaatatttgtgggtgttctgtcattcagcatcgcagtcctgaacaaagtagatattggattggatcagtctctttcgatgccagatgactcctacatggtggattatttcaaatccatcagtcagtacctgcatgcgggtccgcctgtgtactttgtcctggaggaagggcacgactacacttcttccaaggggcagaacatggtgtgcggcggcatgggctgcaacaatgattccctggtgcagcagatatttaacgcggcgcagctggacaactatacccgaataggcttcgccccctcgtcctggatcgacgattatttcgactgggtgaagccacagtcgtcttgctgtcgagtggacaatatcactgaccagttctgcaatgcttcagtggttgaccctgcctgcgttcgctgcaggcctctgactccggaaggcaaacagaggcctcaggggggagacttcatgagattcctgcccatgttcctttcggataaccctaaccccaagtgtggcaaagggggacatgctgcctatagttctgcagttaacatcctccttggccatggcaccagggtcggagccacgtacttcatgacctaccacaccgtgctgcagacctctgctgactttattgacgctctgaagaaagcccgacttatagccagtaatgtcaccgaaaccatgggcattaacggcagtgcctaccgagtatttccttacagtgtgttttatgtcttctacgaacagtacctgaccatcattgacgacactatcttcaacctcggtgtgtccctgggcgcgatatttctggtgaccatggtcctcctgggctgtgagctctggtctgcagtcatcatgtgtgccaccatcgccatggtcttggtcaacatgtttggagttatgtggctctggggcatcagtctgaacgctgtatccttggtcaacctggtgatgagctgtggcatctccgtggagttctgcagccacataaccagagcgttcacggtgagcatgaaaggcagccgcgtggagcgcgcggaagaggcacttgcccacatgggcagctccgtgttcagtggaatcacacttacaaaatttggagggattgtggtgttggcttttgccaaatctcaaattttccagatattctacttcaggatgtatttggccatggtcttactgggagccactcacggattaatatttctccctgtcttactcagttacatagggccatcagtaaataaagccaaaagttgtgccactgaagagcgatacaaaggaacagagcgcgaacggcttctaaatttctagctcgaggacggggtgaactacgcctgaggatccgatctttttccctctgccaaaaattatggggacatcatgaagccccttgagcatctgacttctggctaataaaggaaatttattttcattgcaatagtgtgttggaattttttgtgtctctcactcggcctaggtagataagtagcatggcgggttaatcattaactacaaggaacccctagtgatggagttggccactccctctctgcgcgctcgctcgctcactgaggccgggcgaccaaaggtcgcccgacgcccgggctttgcccgggcggcctcagtgagcgagcgagcgcgcag

SEQ ID NO: 1837-1839 - skipped (3 entries)

SEQ ID NO: 1840 - DNA, 23 bp, Unknown"
  source: /note="Description of Unknown: miR122 binding site sequence"
acaaacaccattgtcacactcca

SEQ ID NO: 1841 - DNA, 71 bp, Unknown"
  source: /note="Description of Unknown: miR122 binding site sequence"
acaaacaccattgtcacactccacacaaacaccattgtcacactccacacaaacaccattgtcacactcca

SEQ ID NO: 1842 - DNA, 23 bp, Unknown"
  source: /note="Description of Unknown: miR-142-3p binding site sequence"
tccataaagtaggaaacactaca

SEQ ID NO: 1843 - DNA, 22 bp, Unknown"
  source: /note="Description of Unknown: miR183 binding site sequence"
agtgaattctaccagtgccata

SEQ ID NO: 1844 - DNA, 24 bp, Unknown"
  source: /note="Description of Unknown: miR182 binding site sequence"
agtgtgagttctaccattgccaaa

SEQ ID NO: 1845 - DNA, 23 bp, Unknown"
  source: /note="Description of Unknown: miR96 binding site sequence"
agcaaaaatgtgctagtgccaaa

What is claimed is:

1. An isolated, e.g., recombinant, nucleic acid comprising a transgene encoding an NPC1 protein, wherein the nucleotide sequence encoding the NPC1 protein comprises a nucleotide sequence with at least 90%, 92%, 95%, 96%, 97%, 98%, or 99% sequence identity to the nucleotide sequence of SEQ ID NO: 1750 or 1749.

2. An isolated, e.g., recombinant, vial genome comprising a promoter operably linked to a nucleic acid comprising a transgene encoding an NPC1 protein, wherein the nucleotide sequence encoding the NPC1 protein comprises a nucleotide sequence with at least 90%, 92%, 95%, 96%, 97%, 98%, or 99% sequence identity to the nucleotide sequence of SEQ ID NO: 1750 or 1749.

3. An isolated, e.g., recombinant, vial genome comprising a promoter operably linked to a nucleic acid comprising a transgene encoding an NPC1 protein, wherein the promoter comprises an EF-1a promoter variant comprising [A]-[B]-[C]-[D]-[E], wherein:
(i) [A] comprises SEQ ID NO: 1792, 1793, or 1794, or a sequence having at least sequence comprising at least one, two, or three but no more than four modifications, e.g., substitutions (e.g., conservative substitutions), relative to the nucleotide sequence of SEQ ID NO: 1792, 1793, or 1794; or [A] is absent;
(ii) [B] comprises the nucleotide sequence of SEQ ID NO: 1795, or a sequence having at least sequence comprising at least one or two, but no more than 3 modifications, e.g., substitutions (e.g., conservative substitutions), relative to the nucleotide sequence of SEQ ID NO: 1795 or [B] is absent;
(iii) [C] comprises the nucleotides GT, the nucleotide sequence of SEQ ID NO: 1797, or a nucleotide sequence comprising at least one, two, or three but no more than four modifications, e.g., substitutions (e.g., conservative substitutions), relative to the nucleotide sequence of SEQ ID NO: 1797, or [C] is absent;
(iv) [D] comprises the nucleotide sequence of SEQ ID NO: 1822, or a nucleotide sequence having at least 90%, 92%, 95%, 96%, 97%, 98%, or 99% sequence identity thereto, provided that [D] does not comprise the nucleotides “GC” at positions 235-236, numbered according to SEQ ID NO: 1781; and
(v) [E] comprises the nucleotide sequence of SEQ ID NO: 1798, or a sequence having at least sequence comprising at least one or two, but no more than 3 modifications, e.g., substitutions (e.g., conservative substitutions), relative to the nucleotide sequence of SEQ ID NO: 1798 or [E] is absent.

4. The viral genome of claim 3, wherein the nucleotide sequence encoding the NPC1 protein comprises a nucleotide sequence with at least 90%, 92%, 95%, 96%, 97%, 98%, or 99% sequence identity to the nucleotide sequence of SEQ ID NO: 1750 or 1749.

5. The isolated nucleic acid of claim 1, or the viral genome of any one of claims 2-4, wherein the nucleotide sequence encoding the NPC1 protein comprises:
(i) the nucleotide sequence of SEQ ID NO: 1750 or a nucleotide sequence at least 95% identical thereto;
(ii) the nucleotide sequence of SEQ ID NO: 1749 or a sequence at least 95% identical thereto.

6. The viral genome of claim 3, wherein the nucleotide sequence encoding the NPC1 protein comprises the nucleotide sequence of SEQ ID NO: 1747, or a nucleotide sequence at least 85%, 90%, 92%, 95%, 96%, 97%, 98%, or 99% sequence identity thereto.

7. The viral genome of any one of claims 1-6, wherein the encoded NPC1 protein comprises:
(i) the amino acid sequence of SEQ ID NO: 1748, or an amino acid sequence at least 95% identical thereto;
(ii) an amino acid sequence encoded by the nucleotide sequence of SEQ ID NO: 1749 or 1750, or a nucleotide sequence at least 90%, 92%, 95%, 96%, 97%, 98%, or 99% identical thereto.

8. The viral genome of any one of claims 2-7, wherein:
(i) [A] is absent;
(ii) [B] comprises the nucleotide sequence of SEQ ID NO: 1795, or a sequence having at least sequence comprising at least one or two, but no more than 3 modifications, e.g., substitutions (e.g., conservative substitutions), relative to the nucleotide sequence of SEQ ID NO: 1795 or [B] is absent;
(iii) [C] comprises the nucleotides GT, the nucleotide sequence of SEQ ID NO: 1797, or a nucleotide sequence comprising at least one, two, or three but no more than four modifications, e.g., substitutions (e.g., conservative substitutions), relative to the nucleotide sequence of SEQ ID NO: 1797, or [C] is absent;
(iv) [D] comprises the nucleotide sequence of SEQ ID NO: 1822, or a nucleotide sequence having at least 90%, 92%, 95%, 96%, 97%, 98%, or 99% sequence identity thereto, provided that [D] does not comprise the nucleotides “GC” at positions 235-236, numbered according to SEQ ID NO: 1781; and
(v) [E] is absent.

9. The viral genome of any one of claims 2-8, wherein:
(i) [A] comprises SEQ ID NO: 1792, or a sequence having at least sequence comprising at least one or two modifications, e.g., substitutions (e.g., conservative substitutions), relative to the nucleotide sequence of SEQ ID NO: 1792;
(ii) [B] comprises the nucleotide sequence of SEQ ID NO: 1795, or a sequence having at least sequence comprising at least one or two, but no more than 3 modifications, e.g., substitutions (e.g., conservative substitutions), relative to the nucleotide sequence of SEQ ID NO: 1795 or [B] is absent;
(iii) [C] comprises the nucleotides GT, the nucleotide sequence of SEQ ID NO: 1797, or a nucleotide sequence comprising at least one, two, or three but no more than four modifications, e.g., substitutions (e.g., conservative substitutions), relative to the nucleotide sequence of SEQ ID NO: 1797, or [C] is absent;
(iv) [D] comprises the nucleotide sequence of SEQ ID NO: 1822, or a nucleotide sequence having at least 90%, 92%, 95%, 96%, 97%, 98%, or 99% sequence identity thereto, provided that [D] does not comprise the nucleotides “GC” at positions 235-236, numbered according to SEQ ID NO: 1781; and
(v) [E] is absent.

10. The viral genome of any one of claims 2-8, wherein:
(i) [A] comprises SEQ ID NO: 1793, or a sequence having at least sequence comprising at least one, two, or three but no more than four modifications, e.g., substitutions (e.g., conservative substitutions), relative to the nucleotide sequence of SEQ ID NO: 1793;
(ii) [B] comprises the nucleotide sequence of SEQ ID NO: 1795, or a sequence having at least sequence comprising at least one or two, but no more than 3 modifications, e.g., substitutions (e.g., conservative substitutions), relative to the nucleotide sequence of SEQ ID NO: 1795 or [B] is absent;
(iii) [C] comprises the nucleotides GT, the nucleotide sequence of SEQ ID NO: 1797, or a nucleotide sequence comprising at least one, two, or three but no more than four modifications, e.g., substitutions (e.g., conservative substitutions), relative to the nucleotide sequence of SEQ ID NO: 1797, or [C] is absent;
(iv) [D] comprises the nucleotide sequence of SEQ ID NO: 1822, or a nucleotide sequence having at least 90%, 92%, 95%, 96%, 97%, 98%, or 99% sequence identity thereto, provided that [D] does not comprise the nucleotides “GC” at positions 235-236, numbered according to SEQ ID NO: 1781; and
(v) [E] is absent.

11. The viral genome of any one of claims 2-8, wherein:
(i) [A] comprises SEQ ID NO: 1794, or a sequence having at least sequence comprising at least one, two, or three but no more than four modifications, e.g., substitutions (e.g., conservative substitutions), relative to the nucleotide sequence of SEQ ID NO: 1794;
(ii) [B] comprises the nucleotide sequence of SEQ ID NO: 1795, or a sequence having at least sequence comprising at least one or two, but no more than 3 modifications, e.g., substitutions (e.g., conservative substitutions), relative to the nucleotide sequence of SEQ ID NO: 1795 or [B] is absent;
(iii) [C] comprises the nucleotides GT, the nucleotide sequence of SEQ ID NO: 1797, or a nucleotide sequence comprising at least one, two, or three but no more than four modifications, e.g., substitutions (e.g., conservative substitutions), relative to the nucleotide sequence of SEQ ID NO: 1797, or [C] is absent;
(iv) [D] comprises the nucleotide sequence of SEQ ID NO: 1822, or a nucleotide sequence having at least 90%, 92%, 95%, 96%, 97%, 98%, or 99% sequence identity thereto, provided that [D] does not comprise the nucleotides “GC” at positions 235-236, numbered according to SEQ ID NO: 1781; and
(v) [E] is absent.

12. The viral genome of any one of claims 2-11, wherein the EF-1α promoter variant comprises the nucleotide sequence of SEQ ID NO: 1785, 1787, 1789, or 1791, or a nucleotide sequence having at least 95% sequence identity thereto, provided that the EF-1α promoter variant does not comprise the nucleotides “GC” at positions 235-236, numbered according to SEQ ID NO: 1781.

13. The viral genome of claim 2, wherein the promoter comprises:
(i) a ubiquitous promoter or a tissue specific promoter;
(ii) an EF-1a promoter, a chicken β-actin (CBA) promoter and/or its derivative CAG, a CMV immediate-early enhancer and/or promoter, a β glucuronidase (GUSB) promoter, a ubiquitin C (UBC) promoter, a neuron-specific enolase (NSE), a platelet-derived growth factor (PDGF) promoter, a platelet-derived growth factor B-chain (PDGF-β) promoter, an intercellular adhesion molecule 2 (ICAM-2) promoter, a synapsin (Syn) promoter, a methyl-CpG binding protein 2 (MeCP2) promoter, a Ca2+/calmodulin-dependent protein kinase II (CaMKII) promoter, a metabotropic glutamate receptor 2 (mGluR2) promoter, a neurofilament light (NFL) or heavy (NFH) promoter, a β-globin minigene nβ2 promoter, a preproenkephalin (PPE) promoter, an enkephalin (Enk) and excitatory amino acid transporter 2 (EAAT2), a glial fibrillary acidic protein (GFAP) promoter, a myelin basic protein (MBP) promoter, a cardiovascular promoter (e.g., αMHC, cTnT, and CMV-MLC2k), a liver promoter (e.g., hAAT, TBG), a skeletal muscle promoter (e.g., desmin, MCK, C512) or a fragment, e.g., a truncation, or a functional variant thereof; and/or
(iii) an EF-1a promoter or an EF-1a promoter variant, optionally wherein the EF-1a promoter comprises the nucleotide sequence of SEQ ID NO: 1781, or a nucleotide sequence at least 95% identical thereto.

14. The viral genome of any one of claim 2 or 13, wherein the promoter comprises:
(i) a CMV promoter;
(ii) a CMVie enhancer and a CMV promoter, optionally wherein the CMVie enhancer comprises the nucleotide sequence of SEQ ID NO: 1743, or a nucleotide sequence at least 95% identical thereto, and the CMV promoter comprises the nucleotide sequence of SEQ ID NO: 1736, or a nucleotide sequence at least 95% identical thereto;
(iii) the nucleotide sequence of SEQ ID NO: 1736 or 1739-1741, or a nucleotide sequence at least 95% identical thereto; or
(iv) the nucleotide sequence of SEQ ID NO: 1736 or a nucleotide sequence at least 95% identical thereto.

15. The viral genome of claim 13 or 14, wherein the CMVie enhancer comprises the nucleotide sequence of SEQ ID NO: 1737, 1742, or 1743, or a nucleotide sequence at least 95% identical thereto.

16. The viral genome of any one of claim 2 or 13-14, wherein the promoter comprises:
(i) a CBA promoter;
(ii) a CMVie enhancer and a CBA promoter, optionally wherein:
(a) the CMVie enhancer comprises the nucleotide sequence of SEQ ID NO: 1742, or a nucleotide sequence 95% identical thereto, and the CBA promoter comprises the nucleotide sequence of SEQ ID NO: 1735, or a nucleotide sequence at least 95% identical thereto; or
(b) the CMVie enhancer comprises the nucleotide sequence of SEQ ID NO: 1737, or a nucleotide sequence 95% identical thereto, and the CBA promoter comprises the nucleotide sequence of SEQ ID NO: 1735, or a nucleotide sequence at least 95% identical thereto; or
(iii) the nucleotide sequence of SEQ ID NO: 1735 or 1738, or a nucleotide sequence at least 95% identical thereto

17. The promoter of claim 2, wherein the promoter comprises an EF-1α promoter variant comprising [A]-[B]-[C]-[D]-[E], wherein:
(i) [A] comprises SEQ ID NO: 1792, 1793, or 1794, or a sequence having at least sequence comprising at least one, two, or three but no more than four modifications, e.g., substitutions (e.g., conservative substitutions), relative to the nucleotide sequence of SEQ ID NO: 1792, 1793, or 1794; or [A] is absent;
(ii) [B] comprises the nucleotide sequence of SEQ ID NO: 1795, or a sequence having at least sequence comprising at least one or two, but no more than 3 modifications, e.g., substitutions (e.g., conservative substitutions), relative to the nucleotide sequence of SEQ ID NO: 1795 or [B] is absent;
(iii) [C] comprises the nucleotides GT, the nucleotide sequence of SEQ ID NO: 1797, or a nucleotide sequence comprising at least one, two, or three but no more than four modifications, e.g., substitutions (e.g., conservative substitutions), relative to the nucleotide sequence of SEQ ID NO: 1797, or [C] is absent;
(iv) [D] comprises the nucleotide sequence of SEQ ID NO: 1822 or 1823, or a nucleotide sequence having at least 90%, 92%, 95%, 96%, 97%, 98%, or 99% sequence identity thereto; and
(v) [E] comprises the nucleotide sequence of SEQ ID NO: 1798, or a sequence having at least sequence comprising at least one or two, but no more than 3 modifications, e.g., substitutions (e.g., conservative substitutions), relative to the nucleotide sequence of SEQ ID NO: 1798 or [E] is absent.

18. The viral genome of claim 17, wherein:
(i) [A] is absent;
(ii) [B] is absent;
(iii) [C] comprises the nucleotides GT;
(iv) [D] comprises the nucleotide sequence of SEQ ID NO: 1823, or a nucleotide sequence having at least 90%, 92%, 95%, 96%, 97%, 98%, or 99% sequence identity thereto; and
(v) [E] comprises the nucleotide sequence of SEQ ID NO: 1798, or a sequence having at least sequence comprising at least one or two, but no more than 3 modifications, e.g., substitutions (e.g., conservative substitutions), relative to the nucleotide sequence of SEQ ID NO: 1798.

19. The viral genome of claim 17, wherein:
(i) [A] is absent;
(ii) [B] is absent;
(iii) [C] comprises the nucleotide sequence of SEQ ID NO: 1797, or a nucleotide sequence comprising at least one, two, or three but no more than four modifications, e.g., substitutions (e.g., conservative substitutions), relative to the nucleotide sequence of SEQ ID NO: 1797;
(iv) [D] comprises the nucleotide sequence of SEQ ID NO: 1823, or a nucleotide sequence having at least 90%, 92%, 95%, 96%, 97%, 98%, or 99% sequence identity thereto; and
(v) [E] comprises the nucleotide sequence of SEQ ID NO: 1798, or a sequence having at least sequence comprising at least one or two, but no more than 3 modifications, e.g., substitutions (e.g., conservative substitutions), relative to the nucleotide sequence of SEQ ID NO: 1798.

20. The viral genome of claim 17, wherein:
(i) [A] is absent;
(ii) [B] comprises the nucleotide sequence of SEQ ID NO: 1795, or a sequence having at least sequence comprising at least one or two, but no more than 3 modifications, e.g., substitutions (e.g., conservative substitutions), relative to the nucleotide sequence of SEQ ID NO: 1795;
(iii) [C] comprises the nucleotide sequence of SEQ ID NO: 1797, or a nucleotide sequence comprising at least one, two, or three but no more than four modifications, e.g., substitutions (e.g., conservative substitutions), relative to the nucleotide sequence of SEQ ID NO: 1797;
(iv) [D] comprises the nucleotide sequence of SEQ ID NO: 1823, or a nucleotide sequence having at least 90%, 92%, 95%, 96%, 97%, 98%, or 99% sequence identity thereto; and
(v) [E] comprises the nucleotide sequence of SEQ ID NO: 1798, or a sequence having at least sequence comprising at least one or two, but no more than 3 modifications, e.g., substitutions (e.g., conservative substitutions), relative to the nucleotide sequence of SEQ ID NO: 1798.

21. The viral genome of claim 17, wherein:
(i) [A] is absent;
(ii) [B] comprises the nucleotide sequence of SEQ ID NO: 1795, or a sequence having at least sequence comprising at least one or two, but no more than 3 modifications, e.g., substitutions (e.g., conservative substitutions), relative to the nucleotide sequence of SEQ ID NO: 1795;
(iii) [C] comprises the nucleotide sequence of SEQ ID NO: 1797, or a nucleotide sequence comprising at least one, two, or three but no more than four modifications, e.g., substitutions (e.g., conservative substitutions), relative to the nucleotide sequence of SEQ ID NO: 1797, or [C] is absent;
(iv) [D] comprises the nucleotide sequence of SEQ ID NO: 1822, or a nucleotide sequence having at least 90%, 92%, 95%, 96%, 97%, 98%, or 99% sequence identity thereto; and
(v) [E] is absent.

22. The viral genome of claim 17, wherein:
(i) [A] comprises SEQ ID NO: 1792, or a sequence having at least sequence comprising at least one or two modifications, e.g., substitutions (e.g., conservative substitutions), relative to the nucleotide sequence of SEQ ID NO: 1792;
(ii) [B] comprises the nucleotide sequence of SEQ ID NO: 1795, or a sequence having at least sequence comprising at least one or two, but no more than 3 modifications, e.g., substitutions (e.g., conservative substitutions), relative to the nucleotide sequence of SEQ ID NO: 1795;
(iii) [C] comprises nucleotide sequence of SEQ ID NO: 1797, or a nucleotide sequence comprising at least one, two, or three but no more than four modifications, e.g., substitutions (e.g., conservative substitutions), relative to the nucleotide sequence of SEQ ID NO: 1797;
(iv) [D] comprises the nucleotide sequence of SEQ ID NO: 1823, or a nucleotide sequence having at least 90%, 92%, 95%, 96%, 97%, 98%, or 99% sequence identity thereto; and
(v) [E] comprises the nucleotide sequence of SEQ ID NO: 1798, or a sequence having at least sequence comprising at least one or two, but no more than 3 modifications, e.g., substitutions (e.g., conservative substitutions), relative to the nucleotide sequence of SEQ ID NO: 1798.

23. The viral genome of claim 17, wherein:
(i) [A] comprises SEQ ID NO: 1792, or a sequence having at least sequence comprising at least one or two modifications, e.g., substitutions (e.g., conservative substitutions), relative to the nucleotide sequence of SEQ ID NO: 1792;
(ii) [B] comprises the nucleotide sequence of SEQ ID NO: 1795, or a sequence having at least sequence comprising at least one or two, but no more than 3 modifications, e.g., substitutions (e.g., conservative substitutions), relative to the nucleotide sequence of SEQ ID NO: 1795;
(iii) [C] comprises the nucleotide sequence of SEQ ID NO: 1797, or a nucleotide sequence comprising at least one, two, or three but no more than four modifications, e.g., substitutions (e.g., conservative substitutions), relative to the nucleotide sequence of SEQ ID NO: 1797;
(iv) [D] comprises the nucleotide sequence of SEQ ID NO: 1822, or a nucleotide sequence having at least 90%, 92%, 95%, 96%, 97%, 98%, or 99% sequence identity thereto; and
(v) [E] is absent.

24. The viral genome of claim 17, wherein:
(i) [A] comprises SEQ ID NO: 1793, or a sequence having at least sequence comprising at least one, two, or three but no more than four modifications, e.g., substitutions (e.g., conservative substitutions), relative to the nucleotide sequence of SEQ ID NO: 1793;
(ii) [B] comprises the nucleotide sequence of SEQ ID NO: 1795, or a sequence having at least sequence comprising at least one or two, but no more than 3 modifications, e.g., substitutions (e.g., conservative substitutions), relative to the nucleotide sequence of SEQ ID NO: 1795;
(iii) [C] comprises the nucleotide sequence of SEQ ID NO: 1797, or a nucleotide sequence comprising at least one, two, or three but no more than four modifications, e.g., substitutions (e.g., conservative substitutions), relative to the nucleotide sequence of SEQ ID NO: 1797;
(iv) [D] comprises the nucleotide sequence of SEQ ID NO: 1823, or a nucleotide sequence having at least 90%, 92%, 95%, 96%, 97%, 98%, or 99% sequence identity thereto; and
(v) [E] comprises the nucleotide sequence of SEQ ID NO: 1798, or a sequence having at least sequence comprising at least one or two, but no more than 3 modifications, e.g., substitutions (e.g., conservative substitutions), relative to the nucleotide sequence of SEQ ID NO: 1798.

25. The viral genome of claim 43, wherein:
(i) [A] comprises SEQ ID NO: 1793, or a sequence having at least sequence comprising at least one, two, or three but no more than four modifications, e.g., substitutions (e.g., conservative substitutions), relative to the nucleotide sequence of SEQ ID NO: 1793;
(ii) [B] comprises the nucleotide sequence of SEQ ID NO: 1795, or a sequence having at least sequence comprising at least one or two, but no more than 3 modifications, e.g., substitutions (e.g., conservative substitutions), relative to the nucleotide sequence of SEQ ID NO: 1795;
(iii) [C] comprises the nucleotide sequence of SEQ ID NO: 1797, or a nucleotide sequence comprising at least one, two, or three but no more than four modifications, e.g., substitutions (e.g., conservative substitutions), relative to the nucleotide sequence of SEQ ID NO: 1797;
(iv) [D] comprises the nucleotide sequence of SEQ ID NO: 1822, or a nucleotide sequence having at least 90%, 92%, 95%, 96%, 97%, 98%, or 99% sequence identity thereto; and
(v) [E] is absent.

26. The viral genome of claim 17, wherein:
(i) [A] comprises SEQ ID NO: 1794, or a sequence having at least sequence comprising at least one, two, or three but no more than four modifications, e.g., substitutions (e.g., conservative substitutions), relative to the nucleotide sequence of SEQ ID NO: 1794;
(ii) [B] comprises the nucleotide sequence of SEQ ID NO: 1795, or a sequence having at least sequence comprising at least one or two, but no more than 3 modifications, e.g., substitutions (e.g., conservative substitutions), relative to the nucleotide sequence of SEQ ID NO: 1795;
(iii) [C] comprises the nucleotide sequence of SEQ ID NO: 1797, or a nucleotide sequence comprising at least one, two, or three but no more than four modifications, e.g., substitutions (e.g., conservative substitutions), relative to the nucleotide sequence of SEQ ID NO: 1797;
(iv) [D] comprises the nucleotide sequence of SEQ ID NO: 1823, or a nucleotide sequence having at least 90%, 92%, 95%, 96%, 97%, 98%, or 99% sequence identity thereto; and
(v) [E] comprises the nucleotide sequence of SEQ ID NO: 1798, or a sequence having at least sequence comprising at least one or two, but no more than 3 modifications, e.g., substitutions (e.g., conservative substitutions), relative to the nucleotide sequence of SEQ ID NO: 1798.

27. The viral genome of claim 17, wherein:
(i) [A] comprises SEQ ID NO: 1794, or a sequence having at least sequence comprising at least one, two, or three but no more than four modifications, e.g., substitutions (e.g., conservative substitutions), relative to the nucleotide sequence of SEQ ID NO: 1794;
(ii) [B] comprises the nucleotide sequence of SEQ ID NO: 1795, or a sequence having at least sequence comprising at least one or two, but no more than 3 modifications, e.g., substitutions (e.g., conservative substitutions), relative to the nucleotide sequence of SEQ ID NO: 1795;
(iii) [C] comprises the nucleotide sequence of SEQ ID NO: 1797, or a nucleotide sequence comprising at least one, two, or three but no more than four modifications, e.g., substitutions (e.g., conservative substitutions), relative to the nucleotide sequence of SEQ ID NO: 1797;
(iv) [D] comprises the nucleotide sequence of SEQ ID NO: 1822, or a nucleotide sequence having at least 90%, 92%, 95%, 96%, 97%, 98%, or 99% sequence identity thereto; and
(v) [E] is absent.

28. The viral genome of any one of claim 2 or 17-27, wherein the promoter comprises the nucleotide sequence of SEQ ID NO: 1785, 1782-1784, 1786-1791, or a sequence at least 95% identical thereto.

29. The viral genome of any one of claims 2-28, which further comprises:
(i) an inverted terminal repeat (ITR) sequence, optionally wherein the ITR sequence is positioned 5′ relative to the transgene encoding the NPC1 protein and/or the ITR sequence is positioned 3′ relative to the transgene encoding the NPC1 protein;
(ii) a polyadenylation (polyA) signal region;
(iii) an intron region;
(iv) an exon region, e.g., at least one, two, or three exon regions;
(v) a Kozak sequence; and/or
(vi) a nucleotide sequence encoding a miR binding site, e.g., a miR binding site that modulates, e.g., reduces, expression of the payload encoded by the viral genome in a cell or tissue where the corresponding miRNA is expressed.

30. The viral genome of claim 29, wherein:
(i) the ITR comprises a nucleotide sequence of SEQ ID NO: 1733, 1734, 1837, or 1838 or a nucleotide sequence at least 95% identical thereto;
(ii) the ITR sequence positioned 5′ relative to the transgene encoding the NPC1 protein comprises the nucleotide sequence of SEQ ID NO: 1733, or a nucleotide sequence with at least 95% sequence identity thereto; and/or the ITR sequence positioned 3′ relative to the transgene encoding the NPC1 protein comprises the nucleotide sequence of SEQ ID NO: 1734, or a nucleotide sequence with at least 95% sequence identity thereto; or
(iii) the ITR sequence positioned 5′ relative to the transgene encoding the NPC1 protein comprises the nucleotide sequence of SEQ ID NO: 1837, or a nucleotide sequence with at least 95% sequence identity thereto; and/or the ITR sequence positioned 3′ relative to the transgene encoding the NPC1 protein comprises the nucleotide sequence of SEQ ID NO: 1838, or a nucleotide sequence with at least 95% sequence identity thereto.

31. The viral genome of claim 29, wherein:
(i) the polyA signal region comprises the nucleotide sequence of SEQ ID NO: 1751, or a nucleotide sequence at least 95% identical thereto;
(ii) the intron region comprises the nucleotide sequence of SEQ ID NO: 1780, or a nucleotide sequence at least 95% identical thereto; and/or
(iii) the Kozak sequence comprises SEQ ID NO: 1746, or a nucleotide sequence comprising at least one, two, or three but no more than four modifications, e.g., substitutions, relative to the nucleotide sequence of SEQ ID NO: 1746

32. The viral genome of claim 29, which comprises:
(i) at least 1-5 copies of an encoded miR binding site, e.g., at least 1, 2, 3, 4, or 5 copies;
(ii) at least 1, 2 or 3 copies of an encoded miR binding sites, optionally wherein
(a) all two or three copies comprise the same miR binding site, or at least one, two, or all of the copies comprise a different miR binding site; and/or
(b) the two or three copies of the encoded miR binding sites are continuous (e.g., not separated by a spacer), or are separated by a spacer (e.g., a spacer sequence comprising the nucleotide sequence of SEQ ID NO: 1846, or a nucleotide sequence having at least one, two, or three modifications, but no more than four modifications of SEQ ID NO: 1846); and/or
(iii) at least two or three copies of an encoded miR binding site, optionally wherein
(a) all two or three copies comprise the same miR binding site, or at least one, two, or all of the copies comprise a different miR binding site; and/or
(b) the two or three copies of the encoded miR binding sites are continuous, (e.g., not separated by a spacer), or are separated by a spacer (e.g., a spacer sequence comprising the nucleotide sequence of SEQ ID NO: 1846, or a nucleotide sequence having at least one, two, or three modifications, but no more than four modifications of SEQ ID NO: 1846).

33. The viral genome of any one of claim 29 or 32, wherein the encoded miR binding site comprises a miR122 binding site, a miR183 binding site, a miR-142-3p, or a combination thereof, optionally wherein:
(i) the encoded miR122 binding site comprises the nucleotide sequence of SEQ ID NO: 1840, or a nucleotide sequence substantially identical (e.g., having at least 70%, 75%, 80%, 85%, 90%, 92%, 95%, 97%, 98%, or 99% sequence identity) thereto; or a nucleotide sequence having at least one, two, three, four, five, six, or seven modifications, but no more than ten modifications of SEQ ID NO: 1840;
(ii) the encoded miR183 binding site comprises the nucleotide sequence of SEQ ID NO: 1843, or a nucleotide sequence substantially identical (e.g., having at least 70%, 75%, 80%, 85%, 90%, 92%, 95%, 97%, 98%, or 99% sequence identity) thereto; or a nucleotide sequence having at least one, two, three, four, five, six, or seven modifications, but no more than ten modifications of SEQ ID NO: 1843; and/or
(iii) the encoded miR-142-3p binding site comprises the nucleotide sequence of SEQ ID NO: 1842, or a nucleotide sequence substantially identical (e.g., having at least 70%, 75%, 80%, 85%, 90%, 92%, 95%, 97%, 98%, or 99% sequence identity) thereto; or a nucleotide sequence having at least one, two, three, four, five, six, or seven modifications, but no more than ten modifications of SEQ ID NO: 1842.

34. The viral genome of any one of claims 2-33, which:
(i) is single stranded;
(ii) further comprises a nucleic acid encoding a capsid protein, e.g., a structural protein, wherein the capsid protein comprises a VP1 polypeptide, a VP2 polypeptide, and/or a VP3 polypeptide, optionally wherein the VP1 polypeptide, the VP2 polypeptide, and/or the VP3 polypeptide are encoded by at least one Cap gene; and/or
(iii) further comprises a nucleic acid encoding a Rep protein, e.g., a non-structural protein, wherein the Rep protein comprises a Rep78 protein, a Rep68, Rep52 protein, and/or a Rep40 protein, optionally wherein the Rep78 protein, the Rep68 protein, the Rep52 protein, and/or the Rep40 protein are encoded by at least one Rep gene.

35. A viral genome comprising in 5′ to 3′ order:
(i) a 5′ adeno-associated (AAV) ITR, optionally wherein the 5′ AAV ITR comprises the nucleotide sequence of SEQ ID NO: 1733, or a nucleotide sequence at least 95% identical thereto;
(ii) an EF-1α promoter variant, optionally wherein the EF-1α promoter variant comprises the nucleotide sequence of SEQ ID NO: 1785, or a nucleotide sequence at least 95% identical thereto;
(iii) a Kozak sequence, optionally wherein the Kozak sequence comprises SEQ ID NO: 1746, or a nucleotide sequence comprising at least one, two, or three but no more than four modifications, e.g., substitutions (e.g., conservative substitutions), relative to the nucleotide sequence of SEQ ID NO: 1746;
(iv) a transgene encoding an NPC1 protein encoded by a nucleotide sequence comprising a nucleotide sequence, e.g., a codon optimized nucleotide sequence, comprising a nucleotide sequence with at least 85% (e.g., at least about 90, 92, 95, 96, 97, 98, or 99%) sequence identity to the nucleotide sequence of SEQ ID NO: 1750;
(v) a polyA signal region, optionally wherein the polyA signal region comprises the nucleotide sequence of SEQ ID NO: 1751, or a nucleotide sequence at least 95% identical thereto; and
(vi) a 3′ AAV ITR, optionally wherein the 3′ AAV ITR comprises the nucleotide sequence of SEQ ID NO: 1734, or a nucleotide sequence at least 95% identical thereto.

36. A viral genome comprising in 5′ to 3′ order:
(i) a 5′ adeno-associated (AAV) ITR, optionally wherein the 5′ AAV ITR comprises the nucleotide sequence of SEQ ID NO: 1733, or a nucleotide sequence at least 95% identical thereto;
(ii) an EF-1a promoter variant, optionally wherein the EF-1a promoter variant comprises the nucleotide sequence of SEQ ID NO: 1785, or a nucleotide sequence at least 95% identical thereto;
(iii) an intron region, optionally wherein the intron region comprises the nucleotide sequence of SEQ ID NO: 1780, or a nucleotide sequence at least 95% identical thereto;
(iv) a transgene encoding an NPC1 protein encoded by a nucleotide sequence comprising a nucleotide sequence, e.g., a codon optimized nucleotide sequence, comprising a nucleotide sequence with at least 85% (e.g., at least about 90, 92, 95, 96, 97, 98, or 99%) sequence identity to the nucleotide sequence of SEQ ID NO: 1750;
(v) a polyA signal region, optionally wherein the polyA signal region comprises the nucleotide sequence of SEQ ID NO: 1751, or a nucleotide sequence at least 95% identical thereto; and
(vi) a 3′ AAV ITR, optionally wherein the 3′ AAV ITR comprises the nucleotide sequence of SEQ ID NO: 1734, or a nucleotide sequence at least 95% identical thereto.

37. A viral genome comprising in 5′ to 3′ order:
(i) a 5′ adeno-associated (AAV) ITR, optionally wherein the 5′ AAV ITR comprises the nucleotide sequence of SEQ ID NO: 1733, or a nucleotide sequence at least 95% identical thereto;
(ii) a CMV promoter variant, optionally wherein the CMV promoter comprises the nucleotide sequence of SEQ ID NO: 1736, or a nucleotide sequence at least 95% identical thereto;
(iii) a Kozak sequence, optionally wherein the Kozak sequence comprises SEQ ID NO: 1746, or a nucleotide sequence comprising at least one, two, or three but no more than four modifications, e.g., substitutions (e.g., conservative substitutions), relative to the nucleotide sequence of SEQ ID NO: 1746;
(iv) a transgene encoding an NPC1 protein encoded by a nucleotide sequence comprising a nucleotide sequence, e.g., a codon optimized nucleotide sequence, comprising a nucleotide sequence with at least 85% (e.g., at least about 90, 92, 95, 96, 97, 98, or 99%) sequence identity to the nucleotide sequence of SEQ ID NO: 1750;
(v) a polyA signal region, optionally wherein the polyA signal region comprises the nucleotide sequence of SEQ ID NO: 1751, or a nucleotide sequence at least 95% identical thereto; and
(vi) a 3′ AAV ITR, optionally wherein the 3′ AAV ITR comprises the nucleotide sequence of SEQ ID NO: 1734, or a nucleotide sequence at least 95% identical thereto.

38. A viral genome comprising in 5′ to 3′ order:
(i) a 5′ adeno-associated (AAV) ITR, optionally wherein the 5′ AAV ITR comprises the nucleotide sequence of SEQ ID NO: 1733, or a nucleotide sequence at least 95% identical thereto;
(ii) a CMV promoter variant, optionally wherein the CMV promoter comprises the nucleotide sequence of SEQ ID NO: 1736, or a nucleotide sequence at least 95% identical thereto;
(iii) an intron region, optionally wherein the intron region comprises the nucleotide sequence of SEQ ID NO: 1780, or a nucleotide sequence at least 95% identical thereto;
(iv) a Kozak sequence, optionally wherein the Kozak sequence comprises SEQ ID NO: 1746, or a nucleotide sequence comprising at least one, two, or three but no more than four modifications, e.g., substitutions (e.g., conservative substitutions), relative to the nucleotide sequence of SEQ ID NO: 1746;
(v) a transgene encoding an NPC1 protein encoded by a nucleotide sequence comprising a nucleotide sequence, e.g., a codon optimized nucleotide sequence, comprising a nucleotide sequence with at least 85% (e.g., at least about 90, 92, 95, 96, 97, 98, or 99%) sequence identity to the nucleotide sequence of SEQ ID NO: 1750;
(vi) a polyA signal region, optionally wherein the polyA signal region comprises the nucleotide sequence of SEQ ID NO: 1751, or a nucleotide sequence at least 95% identical thereto; and
(vii) a 3′ AAV ITR, optionally wherein the 3′ AAV ITR comprises the nucleotide sequence of SEQ ID NO: 1734, or a nucleotide sequence at least 95% identical thereto.

39. The viral genome of any one of claims 2-38, which comprises:
(i) the nucleotide sequence of SEQ ID NO: 1799-1802, or a nucleotide sequence at least 95% identical thereto; or
(ii) the nucleotide sequence of SEQ ID NO: 1814-1821, 1825-1828, or a nucleotide sequence at least 95% identical thereto.

40. The viral genome of any one of claim 2 or 4-38, which comprises the nucleotide sequence of SEQ ID NO: 1755, 1757, 1803-1087, 1810-1812, 1815-1816, 1824, 1827, 1828, or 1830-1831, or a nucleotide sequence at least 95% identical thereto.

41. An isolated, e.g., recombinant, NPC1 protein encoded by the viral genome of any one of claims 2-40.

42. An isolated, e.g., recombinant, AAV particle comprising:
(i) a capsid protein; and
(ii) the viral genome of any one of claims 2-40.

43. The AAV particle of claim 42, wherein:
(i) the capsid protein comprises the amino acid sequence of SEQ ID NO: 138, or an amino acid sequence with at least 80% (e.g., at least about 85, 90, 95, 96, 97, 98, or 99%) sequence identity thereto;
(ii) the capsid protein comprises an amino acid sequence having at least one, two or three modifications but not more than 30, 20 or 10 modifications of the amino acid sequence of SEQ ID NO: 138;
(iii) the capsid protein comprises the amino acid sequence of SEQ ID NO: 11, or an amino acid sequence with at least 80% (e.g., at least about 85, 90, 95, 96, 97, 98, or 99%) sequence identity thereto;
(iv) the capsid protein comprises an amino acid sequence having at least one, two or three modifications but not more than 30, 20 or 10 modifications of the amino acid sequence of SEQ ID NO: 11;
(v) the capsid protein comprises an amino acid sequence encoded by the nucleotide sequence of SEQ ID NO: 137, or a sequence with at least 80% (e.g., at least about 85, 90, 95, 96, 97, 98, or 99%) sequence identity thereto; and/or
(vi) the nucleotide sequence encoding the capsid protein comprises the nucleotide sequence of SEQ ID NO: 137, or a sequence with at least 80% (e.g., at least about 85, 90, 95, 96, 97, 98, or 99%) sequence identity thereto.

44. The AAV particle of claim 42 or 43, wherein the capsid protein comprises:
(i) an amino acid substitution at position K449, e.g., a K449R substitution, numbered according to SEQ ID NO:138;
(ii) an insert comprising the amino acid sequence of TLAVPFK (SEQ ID NO: 1262), optionally wherein the insert is present immediately subsequent to position 588, relative to a reference sequence numbered according to SEQ ID NO:138;
(iii) an amino acid other than “A” at position 587 and/or an amino acid other than “Q” at position 588, numbered according to SEQ ID NO: 138;
(iv) the amino acid substitution of A587D and/or Q588G, numbered according to SEQ ID NO:138.

45. The AAV particle of any one of claims 42-93, wherein the capsid protein comprise:
(a) (i) the amino acid substitution of K449R numbered according to SEQ ID NO:138; and (ii) an insert comprising the amino acid sequence of TLAVPFK (SEQ ID NO: 1262), optionally wherein the insert is present immediately subsequent to position 588 of SEQ ID NO:138;
(b) the capsid protein comprises (i) the amino acid substitution of K449R numbered according to SEQ ID NO:138; (ii) an insert comprising the amino acid sequence of TLAVPFK (SEQ ID NO: 1262), optionally wherein the insert is present immediately subsequent to position 588, relative to a reference sequence numbered according to SEQ ID NO:138; and (iii) the amino acid substitutions of A587D and Q588G, numbered according to SEQ ID NO:138; or
(c) (i) an insert comprising the amino acid sequence of TLAVPFK (SEQ ID NO: 1262), optionally wherein the insert is present immediately subsequent to position 588, relative to a reference sequence numbered according to SEQ ID NO:138; and (ii) the amino acid substitutions of A587D and Q588G, numbered according to SEQ ID NO:138.

46. The AAV particle of claim 42-45, wherein:
(i) the capsid protein comprises the amino acid sequence of SEQ ID NO: 1, or an amino acid sequence substantially identical (e.g., having at least 70%, 75%, 80%, 85%, 90%, 92%, 95%, 97%, 98%, or 99% sequence identity) thereto;
(ii) the capsid protein comprises an amino acid sequence comprising at least one, two, or three modifications but no more than 30, 20, or 10 modifications, e.g., substitutions, relative to the amino acid sequence of SEQ ID NO: 1;
(iii) the capsid protein comprises an amino acid sequence encoded by the nucleotide sequence of SEQ ID NO: 2 or a nucleotide sequence substantially identical (e.g., having at least 70%, 75%, 80%, 85%, 90%, 92%, 95%, 97%, 98%, or 99% sequence identity) thereto; and/or
(iv) the nucleotide sequence encoding the capsid protein comprises the nucleotide sequence of SEQ ID NO: 2, or a nucleotide sequence substantially identical (e.g., having at least 70%, 75%, 80%, 85%, 90%, 92%, 95%, 97%, 98%, or 99% sequence identity) thereto.

47. A vector comprising the viral genome of any one of claims 2-40 or the isolated nucleic acid of claim 1.

48. A cell comprising the viral genome of any one of claims 2-40, the viral particle of any one of claims 42-46, or the vector of claim 47, optionally wherein the cell is a mammalian cell, e.g., an HEK293 cell, an insect cell, e.g., an Sf9 cell, or a bacterial cell.

49. A method of making an isolated, e.g., recombinant, AAV particle, the method comprising
(i) providing a host cell comprising the viral genome of any one of claims 2-40; and
(ii) incubating the host cell under conditions suitable to enclose the viral genome in a capsid protein, e.g., an AAV9 capsid protein;
thereby making the isolated AAV particle.

50. A pharmaceutical composition comprising the AAV particle of any one of claims 42-46, or an AAV particle comprising the viral genome of any one of claims 2-40, and a pharmaceutically acceptable excipient.

51. A method of delivering an exogenous NPC1 protein to a subject, comprising administering an effective amount of the pharmaceutical composition of claim 50, the AAV particle of any one of claims 42-46, or an AAV particle comprising the viral genome of any one of claims 2-40.

52. The method of claim 51, wherein the subject has, has been diagnosed with having, or is at risk of having:
(i) a disease associated with expression of NPC1, e.g., aberrant or reduced NPC1 expression, e.g., expression of an NPC1 gene, NPC1 mRNA, and/or NPC1 protein; and/or
(ii) a lysosomal storage disease or Niemann-Pick disease, type C1.

53. A method of treating a subject having or diagnosed with having a disease associated with NPC1 expression comprising administering to the subject an effective amount of the pharmaceutical composition of claim 50, the AAV particle of any one of claims 42-46, or an AAV particle comprising the viral genome of any one of claims 2-40, thereby treating the disease associated with NPC1 expression in the subject.

54. A method of treating a subject having or diagnosed with having a lysosomal storage disease, comprising administering to the subject an effective amount of the pharmaceutical composition of claim 50, the AAV particle of any one of claims 42-46, or an AAV particle comprising the viral genome of any one of claims 2-40, thereby treating the lysosomal storage disease in the subject.

55. The method of claim 53 or 54, wherein the disease associated with NPC1 expression or the lysosomal storage disease is Niemann-Pick disease, type C1, optionally wherein the Niemann-Pick disease, type C1 is neonate onset Niemann-Pick disease, type C1 or juvenile onset Niemann-Pick disease, type C1.

56. A method of treating a subject having or diagnosed with having a Niemann-Pick disease, type C1 comprising administering to the subject an effective amount of the pharmaceutical composition of claim 50, the AAV particle of any one of claims 42-46, or an AAV particle comprising the viral genome of any one of claims 2-40, thereby treating the Niemann-Pick disease, type C1 in the subject.

57. The method of any one of claims 51-56, wherein the subject:
(i) is a human;
(ii) comprises a mutation in the NPC1 gene, NPC1 mRNA, and/or NPC1 protein;
(iii) is between 0 to 3 months of age;
(iv) is between 3 months to 2 years of age;
(v) is between 2 years of age to 6 years of age;
(vi) is between 6 years of age to 15 years of age; or
(vii) is above 15 years of age.

58. The method of any one of claims 51-57, wherein the AAV particle is administered to the subject intramuscularly, intravenously, intracerebrally, intrathecally, intracerebroventricularly, via intraparenchymal administration, via focused ultrasound (FUS), e.g., coupled with the intravenous administration of microbubbles (FUS-MB), or MRI-guided FUS coupled with intravenous administration, or via intra-cisterna magna injection (ICM).

59. The method of any one of embodiments 51-58, wherein the AAV particle is administered to the subject via intravenous administration, optionally wherein the intravenous administration is via focused ultrasound (FUS), e.g., coupled with the intravenous administration of microbubbles (FUS-MB), or MRI-guided FUS coupled with intravenous administration.

60. The method of any one of claims 51-59, wherein the administration results in increased level of NPC1 protein expression (e.g., 2-fold, 3-fold, 4-fold, 5-fold, 6-fold, 7-fold, 8-fold, 9-fold, 10-fold, 15-fold, 20-fold more NPC protein expression) in a cell of the subject (e.g., a cell of the CNS, e.g., a cell of the cortex, hippocampus, cerebellum, or brainstem), relative to reference level, e.g., a subject that has not received treatment, e.g., has not been administered the AAV particle.

61. The method of any one of claims 51-60, further comprising administration of an additional therapeutic agent and/or therapy suitable for treatment or prevention of the disease associated with NPC1 expression, the lysosomal storage disease, and/or Niemann-Pick disease, type C1, optionally wherein the additional therapeutic agent and/or therapy comprises TRAPPSOL CYCLO, VTS-270 (e.g., a 2-hydroxypropyl-β-cyclodextrin (HPβCD) mixture), arimoclomol (e.g., arimoclomol citrate), or a combination thereof.

62. The isolated nucleic acid of claim 1, the isolated viral genome of any one of claims 2-40, the AAV particle of any one of claims 42-46, or the pharmaceutical composition of claim 50 for use in the manufacture of a medicament.

63. The isolated nucleic acid of claim 1, the isolated viral genome of any one of claims 2-40, the AAV particle of any one of claims 42-46, or the pharmaceutical composition of claim 50 for use in the treatment of a disease associated with NPC1 expression, the lysosomal storage disease, and/or Niemann-Pick disease, type C1.

64. Use of an effective amount of an AAV particle comprising the genome of any one of claims 2-40, the AAV particle of any one of claims 42-46, or the pharmaceutical composition of claim 50 in the manufacture of a medicament for the treatment of a disease associated with NPC1 expression, the lysosomal storage disease, and/or Niemann-Pick disease, type C1.
